(19) United States
(12) Patent Application Publication
(10) Pub. No.: US 2005/0019931 A1
(43) Pub. Date: Jan. 27, 2005

(54) Nucleic acids encoding antifungal drug targets and methods of use

(75) Inventors: Terry Roemer, Montreal (CA); Bo Jiang, Dorval (CA); Charles Boone, Toronto (CA); Howard Bussey, Westmount (CA)

Correspondence Address: JONES DAY, 222 EAST 41ST ST, NEW YORK, NY, 10017, US

(73) Assignees: Elitra Pharmaceuticals, Inc.; Elitra Canada, LTD

(21) Appl. No.: 10/741,849

(22) Filed: Dec. 19, 2003

Related U.S. Application Data
(60) Provisional application No. 60/434,832, filed on Dec. 19, 2002.

(51) Int. Cl. C12N 1/18; C12N 15/74

(52) U.S. Cl. 435/483; 435/254.2

(57) ABSTRACT

The present invention provides Candida albicans genes that are demonstrated to be essential and are potential targets for drug screening. The nucleotide sequence of the target genes can be used for various drug discovery purposes, such as expression of the recombinant protein, hybridization assay and construction of nucleic acid arrays. The uses of proteins encoded by the essential genes, and genetically engineered cells comprising modified alleles of essential genes in various screening methods are also encompassed by the invention.

[0001] This application claims priority to U.S. provisional application Ser. No. 60/434,832, filed Dec. 19, 2002, which is incorporated herein by reference in its entirety.

### 1. INTRODUCTION

[0002] The present invention is directed toward (1) methods for constructing strains useful for identification and validation of gene products as effective targets for therapeutic intervention, (2) methods for identifying and validating gene products as effective targets for therapeutic intervention, (3) a collection of identified essential genes, and (4) screening methods and assay procedures for the discovery of new drugs.

### 2. BACKGROUND OF THE INVENTION

[0003] Validation of a cellular target for drug screening purposes generally involves an experimental demonstration that inactivation of that gene product leaves the cell inviable. Accordingly, a drug active against the same essential gene product expressed, for example, by a pathogenic fungus, would be predicted to be an effective therapeutic agent. Similarly, a gene product required for fungal pathogenicity and virulence is also expected to provide a suitable target for drug screening programs. Target validation in this instance is based upon a demonstration that inactivation of the gene encoding the virulence factor creates a fungal strain that is shown to be either less pathogenic or, ideally, avirulent, in animal model studies. Identification and validation of drug targets are critical issues for detection and discovery of new drugs because these targets form the basis for high throughput screens within the pharmaceutical industry.

[0004] Target discovery has traditionally been a costly, time consuming process, in which newly identified genes and gene products have been individually analyzed as potentially suitable drug targets. DNA sequence analysis of entire genomes has markedly accelerated the gene discovery process. Consequently, new methods and tools are required to analyze this information, first to identify all of the genes of the organism, and then, to discern which genes encode products that will be suitable targets for the discovery of effective, non toxic drugs. Gene discovery through sequence analysis alone does not validate either known or novel genes as drug targets. Elucidation of the function of a gene from the underlying and a determination of whether or not that gene is essential still present substantial obstacles to the identification of appropriate drug targets. These obstacles are especially pronounced in diploid organisms.

[0005] C. albicans is a major fungal pathogen of humans. An absence of identified specific, sensitive, and unique drug targets in this organism has hampered the development of effective, non-toxic compounds for clinical use. The recent completion of the DNA sequence analysis of the entire C. albicans genome has rejuvenated efforts to identify new antifungal drug targets. Nevertheless, two primary obstacles to the exploitation of this information for the development of useful drug targets remain: the paucity of suitable markers for genetic manipulations in C. albicans and the inherent difficulty in establishing, in this diploid organism, whether a specific gene encodes an essential product.

[0006] Current methods for gene disruption in C. albicans (FIG. 1) typically involve a multistep process employing a “URA blaster” gene cassette which is recombined into the genome, displacing the target gene of interest. The URA blaster cassette comprises the CaURA3 marker which is selectable in the corresponding auxotrophic host and which is flanked by direct repeats of the Salmonella typhimurium HisG gene. The URA blaster cassette also carries flanking sequences corresponding to the gene to be replaced, which facilitate precise replacement of that gene by homologous recombination. Putative heterozygous transformants, which have had one allele of the target gene deleted, are selected as uracil prototrophs, and their identity and chromosomal structure confirmed by Southern blot and PCR analyses. Isolates within which intrachromosomal recombination events have occurred between HisG repeats, leading to excision of the CaURA3 gene and loss of the integrated cassette, are selected on 5-fluoroorotic acid (5-FOA) containing media. This allows a repetition of the entire process, including reuse of the Ura-blaster cassette, for disruption of the second allele of the target gene. In those instances in which the target gene is nonessential, homozygous gene disruptions are produced in the second round gene replacement and identified by Southern blot and PCR analyses.

[0007] However, homozygous deletion strains, which lack both alleles of a gene that is essential will not be viable. Accordingly, the Ura blaster method will not provide an unequivocal result, establishing the essential nature of the target gene since alternative explanations, including poor growth of a viable mutant strain, may be equally likely for the negative results obtained. More recent approaches for identification of essential genes, including those disclosed by Wilson, R. B., Davis, D., Mitchell, A. P. (1999) J. Bacteriol. 181:1868-74, employ multiple auxotrophic markers and a PCR-based gene disruption strategy. Although such methods effectively overcome the need to use the Ura Blaster cassette, determination of whether a given gene is essential, and therefore, a potentially useful target, remains labor-intensive and unsuitable for genome-wide analyses. Substantial effort is required to support a statistically valid conclusion that a given gene is essential when using either the Ura blaster cassette or multiple auxotrophic marker-based methods for gene disruption in Candida albicans. Typically, between 30 and 40 second round transformants must all be confirmed as reconstructed heterozygous strains (using PCR or Southern blot analysis) resulting from homologous recombination between the disruption fragment and previously constructed disruption allele, before statistical support to the claim that the gene is essential can be made. Moreover, since secondary mutations may be selected in either the transformation step or 5-FOA counterselection (if the Ura blaster cassette is reused), two independently constructed heterozygous strains are preferably examined during the attempted disruption of the second allele. In addition, demonstration that a particular phenotype is linked to the homozygous mutation of the target gene (and not a secondary mutation) requires complementation of the defect by transforming a wild type copy of the gene back into the disruption strain.

[0008] Finally, the Ura blaster method precludes direct demonstration of gene essentiality. Therefore, one is unable to critically evaluate the terminal phenotype characteristic of essential target genes. Consequently, establishing whether inactivation of a validated drug target gene results in cell death (i.e., a cidal terminal phenotype) versus growth inhibition (i.e., a static terminal phenotype) is not possible with current approaches, despite the value such information would provide in prioritizing drug targets for suitability in drug development.

[0009] Clearly, since current gene disruption methods are labor intensive and largely refractory to a high throughput strategy for target validation, there is a need for effective methods and tools for unambiguous, rapid, and accurate identification of essential genes in diploid, pathogenic fungi, and particularly, in Candida albicans. The present invention overcomes these limitations in current drug discovery approaches by enabling high throughput strategies that provide rapid identification, validation, and prioritization of drug targets, and consequently, accelerate drug screening.

### 3. SUMMARY OF THE INVENTION

[0010] The present invention provides effective and efficient methods that enable, for each gene in the genome of an organism, the experimental determination as to whether that gene is essential, and for a pathogenic organism, in addition, whether it is required for virulence or pathogenicity. The identification and validation of essential genes and those genes critical to the development of virulent infections, provides a basis for the development of high-throughput screens for new drugs against the pathogenic organism.

[0011] The present invention can be practiced with any organism independent of ploidy, and in particular, pathogenic fungi. Preferably, the pathogenic fungi are diploid pathogenic fungi, including but not limited to Candida albicans, Aspergillus fumigatus, Cryptococcus neoformans and the like.

[0012] In one embodiment of the present invention, a set of Candida albicans genes are identified as potential targets for drug screening. Such genes have been determined, using the methods and criteria disclosed herein, to be essential for survival of a pathogenic fungus and/or for the virulence and/or pathogenicity of the pathogenic fungus. The polynucleotides of the essential genes or virulence genes of a pathogenic organism (i.e., the target genes) provided by the present invention can be used by various drug discovery purposes. Without limitation, the polynucleotides can be used to express recombinant protein for characterization, screening or therapeutic use; as markers for host tissues in which the pathogenic organisms invade or reside (either permanently or at a particular stage of development or in a disease states); to compare with DNA sequences of other related or distant pathogenic organisms to identify potential orthologous essential or virulence genes; for selecting and making oligomers for attachment to a nucleic acid array for examination of expression patterns; to raise anti-protein antibodies using DNA immunization techniques; as an antigen to raise anti-DNA antibodies or elicit another immune response; and as a therapeutic agent (e.g., antisense). Where the polynucleotide encodes a protein which binds or potentially binds to another protein (such as, for example, in a receptor-ligand interaction), the polynucleotide can also be used in assays to identify polynucleotides encoding the other protein with which binding occurs or to identify inhibitors of the binding interaction.

[0013] The polypeptides or proteins encoded by the essential genes and virulence genes (i.e. the target gene products) provided by the present invention can also be used in assays to determine biological activity, including its uses as a member in a panel or an array of multiple proteins for high-throughput screening; to raise antibodies or to elicit immune response; as a reagent (including the labeled reagent) in assays designed to quantitatively determine levels of the protein (or its receptor) in biological fluids; as a marker for host tissues in which the pathogenic organisms invade or reside (either permanently or at a particular stage of development or in a disease states); and, of course, to isolate correlative receptors or ligands (also referred to as binding partners) especially in the case of virulence factors. Where the protein binds or potentially binds to another protein (such as, for example, in a receptor-ligand interaction), the protein can be used to identify the other protein with which binding occurs or to identify inhibitors of the binding interaction. Proteins involved in these binding interactions can also be used to screen for peptide or small molecule inhibitors or agonists of the binding interaction, such as those involved in invasiveness, and pathogenicity of the pathogenic organism.

[0014] In another embodiment, the present invention is directed toward a method for constructing a diploid fungal strain in which one allele of a gene is modified by insertion of or replacement by a cassette comprising an expressible dominant selectable marker. This cassette is introduced into the chromosome by recombination, thereby providing a heterozygous strain in which the first allele of the gene is inactivated.

[0015] The other allele of the gene is modified by the introduction, by recombination, of a promoter replacement fragment comprising a heterologous promoter, such that the expression of the second allele of the gene is regulated by the heterologous promoter. Expression from the heterologous promoter can be regulated by the presence of a transactivator protein comprising a DNA-binding domain and transcription-activation domain. The DNA-binding domain of this transactivator protein recognizes and binds to a sequence in the heterologous promoter and increases transcription of that promoter. The transactivator protein can be produced in the cell by expressing a nucleotide sequence encoding the protein.

[0016] This method for the construction of a diploid fungus having both alleles of a gene modified, is carried out, in parallel, with each and every gene of the organism, thereby allowing the assembly a collection of diploid fungal cells each of which comprises the modified alleles of a gene. This collection, therefore, comprises modified alleles of substantially all of the genes of the diploid organism. As used herein, the term “substantially all” includes at least 60%, 70%, 80%, 90%, 95% or 99% of the total. Preferably, every gene in the genome of the diploid organism is represented in the collection. In certain embodiments, the collection may include, in addition to one or more of the essential genes disclosed herein, other essential genes that are known, such as those disclosed in WO 01/60975 and WO 02/053728, which are incorporated herein by reference in their entirety.

[0017] The present invention also encompasses diploid organisms, such as diploid pathogenic fungal strains, comprising modified alleles of a gene, where the first allele of a gene is inactivated by insertion of or replacement by a nucleotide sequence encoding an expressible dominant selectable marker; and where the second allele of the gene has also been modified so that expression of the second allele is regulated by a heterologous promoter. In one aspect of the present invention, the alleles modified in the mutant diploid fungal strain correspond to an essential gene, which is required for growth, viability and survival of the strain. In another aspect of the present invention, the modified alleles correspond to a gene required for the virulence and pathogenicity of the diploid pathogenic fungal strain against a host organism. In both cases, the essential gene and the virulence/pathogenicity gene are potential drug targets.

[0018] Accordingly, the present invention encompasses collections of mutant diploid fungal strains wherein each collection comprises a plurality of strains, each strain containing the modified alleles of a different gene. The collections of strains of the invention include modified alleles for substantially all the different essential genes in the genome of a fungus or substantially all the different virulence genes in the genome of a pathogenic fungus.

[0019] In another embodiment, the present invention is directed to nucleic acid arrays or microarrays which comprise a plurality of defined nucleotide sequences disposed at identifiable or spatially addressable positions on a solid substrate. The defined nucleotide sequences can comprise oligonucleotides complementary to, and capable of hybridizing with, the nucleotide sequences of the essential genes of the diploid pathogenic organism that are required for the growth and survival of the diploid pathogenic organism, the nucleotide sequences of genes contributing to the pathogenicity or virulence of the organism, and/or the unique molecular tags employed to mark each of the mutant strains. The present invention also encompasses protein arrays or microarrays which comprise a plurality of peptides or polypeptides of defined amino acid sequences disposed at spatially addressable positions on a solid substrate. The array can comprise peptides and polypeptides that are capable of binding other biomolecules, such as other proteins, including but not limited to its cognate ligand, antibodies, or fragments thereof, nucleic acid molecules, carbohydrates, lipids, etc.

[0020] The present invention is also directed to methods for the identification of genes essential to the survival of a diploid organism, and of genes that contribute to the virulence and/or pathogenicity of the diploid pathogenic organism. First, the invention provides mutants of diploid organisms, such as mutant fungal cells, having one allele of a gene inactivated by insertion of or replacement with a disruption cassette, and the other allele modified by a nucleic acid molecule comprising a heterologous regulated promoter, such that expression of that second allele is under the control of the heterologous promoter. Second, such mutant cells are cultured under conditions where the second allele of the modified gene is substantially not expressed. The viability or pathogenicity of the cells are then determined. The resulting loss of viability or exhibition of a severe growth defect indicates that the gene that is modified in the mutant cells is essential to the survival of a pathogenic fungus. Similarly, the resulting loss of virulence and/or pathogenicity of the mutant cells indicates that the gene that is modified contributes to the virulence and/or pathogenicity of the pathogenic fungus.

[0021] In yet another embodiment of the present invention, the mutant pathogenic fungal strains constructed according to the methods disclosed are used for the detection of antifungal agents effective against pathogenic fungi. Mutant cells of the invention are cultured under differential growth conditions in the presence or absence of a test compound. The growth rates are then compared to indicate whether or not the compound is active against a target gene product. The second allele of the target gene may be substantially underexpressed to provide cells with enhanced sensitivity to compounds active against the gene product expressed by the modified allele. Alternatively, the second allele may be substantially overexpressed to provide cells with increased resistance to compounds active against the gene product expressed by the modified allele of the target gene.

[0022] In yet another embodiment of the present invention, the strains constructed according to the methods disclosed are used for the screening of therapeutic agents effective for the treatment of non-fungal infectious diseases in a plant or an animal, such as a human. As a consequence of the similarity of a target's amino acid sequence with a plant or animal counterpart, or the lack of sequence similarity, active compounds so identified may have therapeutic applications for the treatment of diseases in the plant or animal, in particular, human diseases, such as cancers and immune disorders.

[0023] The present invention, in other embodiments, further encompasses the use of transcriptional profiling and proteomics techniques to analyze the expression of essential and/or virulence genes under a variety of conditions, including in the presence of known drugs. The information yielded from such studies can be used to uncover the target and mechanism of known drugs, to discover new drugs that act in a similar fashion to known drugs, and to delineate the interactions between gene products that are essential to growth and survival of the organism and that are instrumental to virulence and pathogenicity of the organism.

[0024] Any or all of these drug discovery utilities are capable of being developed into a kit for commercialization as research products. The kits may comprise polynucleotides and/or polypeptides corresponding to a plurality of essential genes and virulence genes of the invention, antibodies, and/or other reagents.

### 4. BRIEF DESCRIPTION OF THE DRAWINGS

[0025] FIG. 1 depicts the URA blaster method for gene disruption in Candida albicans.

[0026] FIG. 2 depicts the GRACE method for constructing a gene disruption of one allele of a gene (CaKRE9), and promoter replacement of the second allele of the target gene, placing the second allele under conditional, regulated control by a heterologous promoter.

[0027] FIG. 3 presents conditional gene expression, using GRACE technology, with KRE1, KRE5, KRE6 and KRE9.

[0028] FIG. 4 presents conditional gene expression using GRACE technology with CaKRE1, CaTUB1, CaALG7, CaAUR1, CaFKS1 and CaSAT2.

[0029] FIG. 5 presents a Northern Blot Analysis of CaHIS3, CaALR1, CaCDC24 and CaKRE9 mRNA isolated from GRACE strains to illustrate elevated expression under non-repressing conditions.

[0030] FIG. 6 presents growth of a CaHIS3 heterozygote strain and a tetracycline promoter-regulated CaHIS3 GRACE strain compared to growth of a wild-type diploid CaHIS3 strain in the presence and absence of 3-aminotriazole (3-AT).

[0031] FIG. 6A depicts growth of a wild-type strain and a CaHIS3 heterozygote strain as compared with a CaHIS3 GRACE strain constitutively expressing the tetracycline promoter-regulated imidazoleglycerol phosphate dehydratase, in the presence of inhibitory levels of 3-aminotriazole.

[0032] FIG. 6B depicts growth of a wild-type strain, a haploinsufficient CaHIS3 heterozygote strain, and a CaHIS3 GRACE strain constitutively expressing the tetracycline promoter-regulated imidazoleglycerol phosphate dehydratase, in the presence of an intermediate level of 3-aminotriazole.

[0033] FIG. 6C depicts growth of a wild-type strain, a haploinsufficient CaHIS3 heterozygote strain, and a CaHIS3 GRACE strain minimally expressing the tetracycline promoter-regulated imidazoleglycerol phosphate dehydratase, in the presence of an intermediate level of 3-aminotriazole.

[0034] FIG. 6D demonstrates the hypersensitivity of the CaHIS3 GRACE strain minimally expressing the tetracycline promoter-regulated imidazoleglycerol phosphate dehydratase, in the presence of an intermediate level of 3-aminotriazole.

### 5. DETAILED DESCRIPTION OF THE INVENTION

### 5.1 Gene Disruption And Drug Target Discovery

[0035] The present invention provides a systematic and efficient method for drug target identification and validation. The approach is based on genomics information as well as the biological function of individual genes.

[0036] The methods of the invention generates a collection of genetic mutants in which the dosage of specific genes can be modulated, such that their functions in growth, survival, and/or pathogenicity can be investigated. The information accrued from such investigations allows the identification of individual gene products as potential drug targets. The present invention further provides methods of use of the genetic mutants either individually or as a collection in drug screening and for investigating the mechanisms of drug action.

[0037] Generally, in gene disruption experiments, the observation that homozygous deletions cannot be generated for both alleles of a gene in a diploid organism, cannot, per se, support the conclusion that the gene is an essential gene. Rather, a direct demonstration of expression of the gene in question that is coupled with viability of the cell carrying that gene, is required for the unambiguous confirmation that the gene in question is essential.

[0038] A direct demonstration that a given gene is essential for survival of a cell can be established by disrupting its expression in diploid organisms which have a haploid stage. For example, in Saccharomyces cerevisiae, this is achieved by complete removal of the gene product through gene disruption methods in a diploid cell type, followed by sporulation and tetrad dissection of the meiotic progeny to enable direct comparison of haploid yeast strains possessing single mutational differences. However, such an approach is not applicable to asexual yeast strains, which include most diploid pathogenic cell types, and alternative methods are required for eliminating expression of a putative essential gene.

[0039] In one embodiment, the invention provides a method for creating a diploid mutant cell of an organism in which the dosage of a specific gene can be modulated. By this method of the invention, one allele of a target gene in a diploid cell of an organism is disrupted while the second allele is modified by having its promoter replaced by a regulated promoter of heterologous origin. A strain constructed in this manner is said to comprise a modified allelic pair, i.e., a gene wherein both alleles are modified as described above. Where the genomic DNA sequence of the organism is available, this process may be repeated with each and every gene of the organism, thereby constructing a collection of mutant organisms each harboring a disrupted allele and an allele which can be conditionally expressed. This gene disruption strategy, therefore, provides a substantially complete set of potential drug target genes for that organism. This collection of mutant organisms, comprising a substantially complete set of modified allelic pairs, forms the basis for the development of high throughput drug screening assays. A collection of such mutant organisms can be made even when the genomic sequences of an organism are not completely sequenced. It is contemplated that a smaller collection of mutant organisms can be made, wherein in each mutant organism, one allele of a desired subset of gene is disrupted, and the other allele of the genes in this subset is placed under conditional expression. The method of the invention employed for the construction of such strains is referred to herein as the GRACE method, where the acronym is derived from the phrase gene replacement and conditional expression.

[0040] The GRACE method, which involves disruption of one allele coupled with conditional expression of the other allele, overcomes limitations relying upon repeated cycles of disruption with the URA blaster cassette followed by counterselection for its loss. The GRACE method permits large scale target validation in a diploid pathogenic microorganism, such as a pathogenic fungus.

[0041] The GRACE method of the invention, as applied to a diploid cell involves two steps: (i) gene replacement resulting in disruption of the coding and/or non-coding region(s) of one wild type allele by insertion, truncation, and/or deletion, and (ii) conditional expression of the remaining wild type allele via promoter replacement or conditional protein instability (FIG. 2). Detailed descriptions of the method is provided in later sections.

[0042] Isolated mutant organisms resulting from the application of the GRACE method are referred to herein as GRACE strains of the organism. Such mutant strains of an organism are encompassed by the invention. In a particular embodiment, a collection of GRACE strains which are generated by subjecting substantially all the different genes in the genome of the organism to modification by the GRACE method is provided. In this collection, each strain comprises the modified alleles of a different gene, and substantially all the genes of the organism are represented in the collection. It is intended that a GRACE strain is generated for every gene in an organism of interest. Alternatively, a smaller collection of GRACE strains of an organism can be generated wherein a desired subset of the genes in the organism are modified by the GRACE method.

[0043] A gene is generally considered essential when viability and/or normal growth of the organism is substantially coupled to or dependent on the expression of the gene. An essential function for a cell depends in part on the genotype of the cell and in part the cell's environment. Multiple genes are required for some essential function, for example, energy metabolism, biosynthesis of cell structure, replication and repair of genetic material, etc. Thus, the expression of many genes in an organism are essential for its growth and/or survival. Accordingly, when the viability or normal growth of a GRACE strain under a defined set of conditions is coupled to or dependent on the conditional expression of the remaining functional allele of a modified allelic gene pair, the gene which has been modified in this strain by the GRACE method is referred to as an “essential gene” of the organism.

[0044] A gene is generally considered to contribute to the virulence/pathogenicity of an organism when pathogenicity of the organism is associated at least in part to the expression of the gene. Many genes in an organism are expected to contribute to the virulence and/or pathogenicity of the organism. Accordingly, when the virulence and/or pathogenicity of a GRACE strain to a defined host or to defined set of cells from a host is associated with the conditional expression of the remaining functional allele of a modified allelic gene pair, the gene which has been modified in this strain by the GRACE method is referred to as a “virulence gene” of the organism.

[0045] The present invention provides a convenient and efficient method to identify essential genes of a pathogenic organism, and to validate their usefulness in drug discovery programs. The method of the invention can similarly be used to identify virulence genes of a pathogenic organism. The identities of these essential genes and virulence genes of an organism as identified by the GRACE method are encompassed in the present invention. Substantially all of the essential genes and virulence genes of an organism can be identified and validated by the GRACE method of the invention.

[0046] Each of the essential genes and virulence genes so identified represent a potential drug target for the organism, and can be used individually or as a collection in various methods of drug screening. Depending on the objective of the drug screening program and the target disease, the essential genes and virulence genes of the invention can be classified and divided into subsets based on the structural features, functional properties, and expression profile of the gene products. The gene products encoded by the essential genes and virulence genes within each subset may share similar biological activity, similar intracellular localization, structural homology, and/or sequence homology. Subsets may also be created based on the homology or similarity in sequence to other organisms in a similar or distant taxonomic group, e.g. homology to Saccharomyces cerevisiae genes, or to human genes, or a complete lack of sequence similarity or homology to genes of other organisms, such as S. cerevisiae or human. Subsets may also be created based on the display of cidal terminal phenotype or static terminal phenotype by the organism bearing the modified gene. Such subsets, referred to as essential gene sets or virulence gene sets, which can be conveniently investigated as a group in a drug screening program, are provided by the present invention. Accordingly, the present invention provides a plurality of mutant organisms, such as a collection of GRACE strains, each comprising the modified alleles of a different gene, wherein each gene is essential for the growth and/or survival of the cells. The collection can be used according to the various methods of the invention, wherein the cells of each strain in the collection are separately subjected to the same manipulation or treatment related to the use. Alternatively, the cells of each strain in the collection are pooled before the manipulation or treatment related to the use. The concept of a collection is also extended to data collection, processing and interpretation where data arising from different strains of fungal cells or a pool of different fungal strains in the collection are handled coordinately as a set.

[0047] In a specific embodiment, substantially all of the essential genes in the genome of a pathogenic fungus are identified by the GRACE method, and the GRACE strains containing the modified allelic pairs of essential genes are included in a collection of GRACE strains. In another specific embodiment, substantially all of the virulence genes in the genome of a pathogenic fungus are identified by the GRACE method, and the GRACE strains containing the modified allelic pairs of virulence genes are included in a collection of GRACE strains.

[0048] For Candida albicans, based on analysis of the C. albicans genome sequence a collection of GRACE strains for the entire genome may comprise approximately 7000 strains each with a modified allelic pairs of genes. The complete set of essential genes of C. albicans is estimated to comprise approximately 1000 genes. The present invention provides the identities of many of these genes in C. albicans, and the various uses of these genes and their products as drug targets. In addition, estimates as to the number of genes participating in the virulence of this pathogen range between 100 and 400 genes. Once the identity of an essential gene is known, various types of mutants containing one or more copies of the mutated essential gene created by other methods beside the GRACE method are contemplated and encompassed by the invention.

[0049] The invention also provides biological and computational methods, and reagents that allow the isolation and identification of genes that are homologous to the identified essential and virulence genes of C. albicans. Information obtained from the GRACE strains of diploid organisms can be used to identify homologous sequences in haploid organisms. The identities and uses of such homologous genes are also encompassed by the present invention.

[0050] For clarity of discussion, the invention is described in the subsections below by way of example for the pathogenic fungus, Candida albicans. However, the principles may be analogously applied to the essential and virulence genes of other pathogens and parasites, of plants and animals including humans. The GRACE method can be applied to any pathogenic organisms that has a diploid phase in their life cycles. Hence, the term diploid pathogenic organism is not limited to organism that exist exclusively in diploid form, but encompasses also organisms that have both haploid and diploid phases in their life cycle.

[0051] For example, the GRACE method for drug target identification and validation can be directly applied to other pathogenic fungi. Deuteromycetous fungi, i.e. those lacking a sexual cycle and classical genetics, (in which C. albicans is included), represent the majority of human fungal pathogens. Aspergillus fumigatus is another medically-significant member of this phylum, which, more strictly, includes members of the Ascomycota and the Basidiomycota. A. fumigatus, an Ascomycte is the predominant air borne infectious fungal agent causing respiratory infection, or invasive aspergillosis (IA), in immunocompromised patients. While relatively unknown 20 years ago, today the number of IA cases is estimated to be several thousand per year. Moreover, IA exhibits a mortality rate exceeding 50% and neither amphothericin B nor fluconazole are highly efficacious. Compounding these problems is that identification of novel drug targets is limited by the current state of target validation in this organism.

[0052] The GRACE method demonstrated for C. albicans is readily adapted for use with A. fumigatus, for the following reasons. Although, A. fumigatus possesses a haploid genome, the GRACE method could be simplified to one step-conditional promoter replacement of the wild type promoter. Since A. fumigatus, in contrast to Candida albicans, adheres to the universal genetic code, extensive site-directed mutagenesis, like that required to engineer the GRACE method for C. albicans, would not be required. Moreover, essential molecular biology techniques such as transformation and gene disruption via homologous recombination have been developed for A. fumigatus. Selectable markers are available for these techniques in A. fumigatus, and include genes conferring antibiotic resistance to hygromycin B and phleomycin, and the auxotrophic marker, ura3. Furthermore, both public and private A. fumigatus genome sequencing projects exist. Therefore, sequence information is available both for the identification of putative essential genes as well as for the experimental validation of these drug targets using the GRACE method. Additional pathogenic deuteromycetous fungi to which the GRACE method may be applied include Aspergillus flavus, Aspergillus niger, and Coccidiodes immitis.

[0053] In another aspect of the present invention, the GRACE method for drug target identification and validation is applied to Basidiomycetous pathogenic fungi. One particular, medically-significant member of this phylum is Cryptococcus neoformans. This air borne pathogen represents the fourth (7-8%) most commonly recognized cause of life-threatening infections in AIDS patients. Transformation and gene disruption strategies exist for C. neoformans and a publically funded genome sequencing project for this organism is in place. C. neoformans possesses a sexual cycle, thus enabling the GRACE method to be employed with both haploid and diploid strains. Other medically-significant Basidiomycetes include Trichosporon beigelii and Schizophylum commune.

[0054] In the same way medically relevant fungal pathogens are suitable for a rational drug target discovery using the present invention, so too may plant fungal pathogens and animal pathogens be examined to identify novel drug targets for agricultural and veterinary purposes. The quality and yield of many agricultural crops including fruits, nuts, vegetables, rice, soybeans, oats, barley and wheat are significantly reduced by plant fungal pathogens. Examples include the wheat fungal pathogens causing leaf blotch (Septoria tritici, glume blotch (Septoria nodorum), various wheat rusts (Puccinia recondita, Puccinia graminis); powdery mildew (various species), and stem/stock rot (Fusarium spp.). Other particularly destructive examples of plant pathogens include, Phytophthora infestans, the causative agent of the Irish potato famine, the Dutch elm disease causing ascomycetous fungus, Ophiostoma ulmi, the corn smut causing pathogen, Ustilago maydis, the rice-blast-causing pathogen Magnapurtla grisea, Peronospora parasitica (Century et al., Proc Natl Acad Sci USA 1995 Jul. 3;92(14):6597-601); Cladosporium fulvum (leaf mould pathogen of tomato); Fusarium graminearum, Fusarium culmorum, and Fusarium avenaceum, (wheat, Abramson et al., J Food Prot 2001 August;64(8):1220-5); Alternaria brassicicola (broccoli; Mora et al., Appl Microbiol Biotechnol 2001 April;55(3):306-10); Alternaria tagetica (Gamboa-Angulo et al., J Agric Food Chem 2001 March;49(3): 1228-32); the cereal pathogen Bipolaris sorokiniana (Apoga et al., FEMS Microbiol Lett 2001 Apr. 13;197(2):145-50); the rice seedling blast fungus Pyricularia grisea (Lee et al., Mol Plant Microbe Interact 2001 April;14(4):527-35); the anther smut fungus Microbotryum violaceum (Bucheli et al.,: Mol Ecoli 2001 February;10(2):285-94); Verticillium longisporum comb. November (wilt of oilseed rape, Karapapa et al., Curr Microbiol 2001 March;42(3):217-24); Aspergillus flavus infection of cotton bolls (Shieh et al., Appl Environ Microbiol 1997 September;63(9):3548-52; the eyespot pathogen Tapesia yallundae (Wood et al., FEMS Microbiol Lett 2001 Mar. 15;196(2):183-7); Phytophthora cactorum strain P381 (strawberry leaf necrosis, Orsomando et al., J Biol Chem 2001 Jun. 15;276(24):21578-84); Sclerotinia sclerotiorum, an ubiquitous necrotrophic fungus (sunflowers, Poussereau et al., Microbiology 2001 March;147(Pt 3):717-26); pepper plant/cranberry, anthracnose fungus Colletotrichum gloeosporioides (Kim et al., Mol Plant Microbe Interact 2001 January;14(1):80-5); Nectria haematococca (pea plants, Han et al., Plant J 2001 February;25(3):305-14); Cochliobolus heterostrophus (Monke et al., Mol Gen Genet 1993 October;241(1-2):73-80), Glomerella cingulata (Rodriquez et al., Gene 1987;54(1):73-81) obligate pathogen Bremia lactucae (lettuce downy mildew; Judelson et al., Mol Plant Microbe Interact 1990 July-August;3(4):225-32) Rhynchosporium secalis (Rohe et al., Curr Genet 1996 May;29(6):587-90), Gibberella pulicaris (Fusarium sambucinum), Leptosphaeria maculans (Farman et al., Mol Gen Genet 1992 January;231(2):243-7), Cryphonectria parasitica and Mycosphaerella fijiensis and Mycosphaerella musicola, the causal agents of black and yellow Sigatoka, respectively, and Mycosphaerella eumusae, which causes Septoria leaf spot of banana (banana & plantain, Balint-Kurti et al., FEMS Microbiol Lett 2001 Feb. 5;195(1):9-15). The emerging appearance of fungicidal-resistant plant pathogens and increasing reliance on monoculture practices, clearly indicate a growing need for novel and improved fungicidal compounds. The present invention encompasses identification and validation of drug targets in pathogens and parasites of plants and livestock. Accordingly, the application of the GRACE method to identify and validate drug targets in pathogens and parasites of plants and livestock are encompassed. Table I lists exemplary groups of haploid and diploid fungi of medical, agricultural, or commercial value.

TABLE I
Exemplary Haploid and Diploid Fungi

| | | |
|---|---|---|
| | | General Commercial |
| Animal pathogens: | Plant Pathogens: | Significance |

Ascomycota

| | | |
|---|---|---|
| Aspergillus fumigatus | Alternaria solanii | Aspergillus niger |
| Alternaria spp | Gaeumannomyces graminis | Schizosaccharomyces pombe |
| Blastomyces dermatidis | Cercospora zeae-maydis | Pichia pastoris |
| Candida spp including | Botrytis cinerea | Hansenula polymorpha |
| Candida dublinensis | Claviceps purpurea | Ashbya gossipii |
| Candida glabrata | Corticum rolfsii | Aspergillus nidulans |
| Candida krusei | Endothia parasitica | Trichoderma reesei |
| Candida lustaniae | Sclerotinia sclerotiorum | Aureobasidium pullulans |
| Candida parapsilopsis | Erysiphe gramini | Yarrowia lipolytica |
| Candida tropicalis | Erysiphe triticii | Candida utilis |
| Coccidioides immitis | Fusarium spp. | Kluveromyces lactis |
| Exophalia dermatiditis | Magnaporthe grisea | |
| Fusarium oxysporum | Plasmopara viticola | |
| Histoplasma capsulatum | Penicillium digitatum | |
| Pneumocystis carini | Ophiostoma ulmi | |
| | Rhizoctonia species including oryzae | |
| | Septoria species including | |
| | Septoria avenae | |
| | Septoria nodorum | |
| | Septoria passerinii | |
| | Septoria triticii | |
| | Venturia inequalis | |
| | Verticillium dahliae | |
| | Verticillium albo-atrum | |

Basidiomycota

| | | |
|---|---|---|
| Cryptococcus neoformans | Puccinia spp including | Agaricus campestris |
| Trichosporon beigelii | Puccinia coronata | Phanerochaete chrysosporium |
| | Puccinia graminis | Gloeophyllum trabeum |
| | Puccinia recondita | Trametes versicolor |
| | Puccinia striiformis | |
| | Tilletia spp including | |
| | Tilletia caries | |
| | Tilletia controversa | |
| | Tilletia indica | |
| | Tilletia tritici | |
| | Tilletia foetida | |
| | Ustilago maydis | |
| | Ustilago hordeii | |

Zygomycota

Absidia corymbifera
Mucor rouxii
Rhizomucor pusillus
Rhizopus arrhizus

All Candida species except Candida glabrata are obligate diploid species that lack a haploid phase in its life cycle, and are thus subject to the application of the GRACE methods.

### 5.2 Construction of GRACE Strains

[0056] According to the invention, in a GRACE strain of a diploid organism, only one allele of a gene is eliminated, while the second allele is placed under the control of the heterologous promoter, the activity of which is regulatable. Where the gene is essential, elimination of both alleles will be lethal or severely crippling for growth. Therefore, in the present invention, a heterologous promoter is used to provide a range of levels of expression of the second allele. Depending on the conditions, the second allele can be non-expressing, underexpressing, overexpressing, or expressing at a normal level relative to that when the allele is linked to its native promoter. A heterologous promoter is a promoter from a different gene from the same pathogenic organism, or it can be a promoter from a different species.

[0057] Precise replacement of a target gene is facilitated by using a gene disruption cassette comprising a selectable marker, preferably a dominant selectable marker, that is expressible in the strain of interest. The availability of two distinct dominant selectable markers allows the gene replacement process to be engineered at both alleles of the target gene, without the required counterselection step inherent in existing methods.

[0058] In particular, the present invention encompasses a method for constructing a strain of diploid pathogenic fungal cells, in which both alleles of a gene are modified, the method comprising the steps of (a) modifying a first allele of a gene in diploid pathogenic fungal cells by recombination using a gene disruption cassette comprising a nucleotide sequence encoding a selectable marker that is expressible in the cells, thereby providing heterozygous pathogenic fungal cells in which the first allele of the gene is inactivated; and (b) modifying the second allele of the gene in the heterozygous diploid pathogenic fungal cells by recombination with a promoter replacement fragment comprising a heterologous promoter, such that the expression of the second allele of the gene is regulated by the heterologous promoter.

[0059] The process can be repeated for a desired subset of the genes such that a collection of GRACE strains is generated wherein each strain comprises a modified allelic pair of a different gene. By repeating this process for every gene in a pathogenic fungus, a complete set of GRACE strains representing the entire genome of the pathogenic fungus can be obtained. Thus, the present invention provides a method of assembling a collection of diploid pathogenic fungal cells, each of which comprises the modified alleles of a different gene. The method comprises repeating the steps of modifying pairs of alleles a plurality of times, wherein a different pair of gene alleles is modified with each repetition, thereby providing the collection of diploid pathogenic fungal cells each comprising the modified alleles of a different gene.

[0060] A preferred embodiment for the construction of GRACE strains, uses the following two-step method. C. albicans is used as an example.

### 5.2.1 Heterozygote Construction By Gene Disruption

[0061] Several art-known methods are available to create a heterozygote mutant. In less preferred embodiments, auxotrophic markers, such as but not limited to CaURA3, CaHIS3, CaLEU2, or CaTRP1, could be used for gene disruption if desired. However, the preferred method of heterozygote construction in diploid fungi employs a genetically modified dominant selectable marker. C. albicans is sensitive to the nucleoside-like antibiotic streptothricin at a concentration of 200 micrograms per milliliter. The presence of the Escherichia coli SAT1 gene within C. albicans allows acetylation of the drug rendering it nontoxic and permitting the strain to grow in the presence of streptothricin at a concentration of 200 micrograms per milliliter. Expression of the SAT1 gene in C. albicans is made possible by engineering the gene so that its DNA sequence is altered to conform to the genetic code of this organism and by providing a CaACT1 promoter (Morschhauser et al. (1998) Mol. Gen. Genet. 257:412-420) and a CaPCK1 terminator sequence (Leuker et al. (1997) Gene 192: 235-40). This genetically modified marker is referred to as CaSAT1 which is the subject of a copending United States nonprovisional application, published under the publication no. US20010031724, which is incorporated herein by reference in its entirety.

[0062] C. albicans is also sensitive to a second fungicidal compound, blasticidin, whose cognate resistance gene from Bacillus cereus, BSR, has similarly been genetically engineered for expression in C. albicans (CaBSR1), and has been shown to confer a dominant drug resistance phenotype. PCR amplification of either dominant selectable marker so as to include about 65 bp of flanking sequence identical to the sequence 5′ and 3′ of the C. albicans gene to be disrupted, allows construction of a gene disruption cassette for any given C. albicans gene.

[0063] By employing the method of Baudin et al. (1993, Nucleic Acids Research 21:3329-30), a gene disruption event can be obtained following transformation of a C. albicans strain with the PCR-amplified gene disruption cassette and selection for drug resistant transformants that have precisely replaced the wild type gene with the dominant selectable marker. Such mutant strains can be selected for growth in the presence of a drug, such as but not limited to streptothricin. The resulting gene disruptions are generally heterozygous in the diploid C. albicans, with one copy of the allelic pair on one homologous chromosome disrupted, and the other allele on the other homologous chromosome remaining as a wild type allele as found in the initial parental strain. The disrupted allele is non-functional, and expression from this allele of the gene is nil. By repeating this process for all the genes in the genome of an organism, a set of gene disruptions can be obtained for every gene in the organism. The method can also be applied to a desired subset of genes.

### 5.2.2 Conditional Expression By a Tetracycline-Regulatable Promoter

[0064] The conditional expression system used in this embodiment of the invention comprises a regulatable promoter and a means for regulating promoter activity. Conditional expression of the remaining wild type allele in a heterozygote constructed as set forth in Section 5.1.1 is achieved by replacing its promoter with a tetracycline-regulatable promoter system that is developed initially for S. cerevisiae but which is modified for use in C. albicans. See Gari et al., 1997, Yeast 13:837-848; and Nagahashi et al., 1997, Mol. Gen. Genet. 255:372-375.

[0065] Briefly, conditional expression is achieved by first constructing a transactivation fusion protein comprising the E. Coli TetR tetracycline repressor domain or DNA binding domain (amino acids 1-207) fused to the transcription activation domain of S. cerevisiae GAL4 (amino acids 785-881) or HAP4 (amino acids 424-554). Multiple CTG codon corrections were introduced to comply with the C. albicans genetic code. The nucleotide sequences encoding the transactivation fusion proteins of E. coli TetR (amino acids 1-207) plus S. cerevisiae GAL4 (amino acids 785-881), and of E. coli TetR (amino acids 1-207) plus S. cerevisiae HAP4 (amino acids 424-554), both of which have been modified for proper expression in C. albicans are encompassed by the present invention. Accordingly, the invention provides haploid or diploid cells that can comprise a nucleotide sequence encoding a transactivation fusion protein expressible in the cells, wherein the transactivation fusion protein comprises a DNA binding domain and a transcription activation domain.

[0066] Constitutive expression of the transactivation fusion protein in C. albicans can be achieved by providing a CaACT1 promoter and CaACT1 terminator sequence. However, it will be appreciated that any regulatory regions, promoters and terminators, that are functional in C. albicans can be used to express the fusion protein. Thus, a nucleic acid molecule comprising a promoter functional in C. albicans, the coding region of a transactivation fusion protein, and a terminator functional in C. albicans, are encompassed by the present invention. Such a nucleic acid molecule can be a plasmid, a cosmid, a transposon, or a mobile genetic element. In a preferred embodiment, the TetR-Gal4 or TetR-Hap4 transactivators can be stably integrated into a C. albicans strain, by using either ura3 and his3 auxotrophic markers.

[0067] In this embodiment, the invention further provides that a promoter replacement fragment comprising a nucleotide sequence encoding heterologous promoter which comprises at least one copy of a nucleotide sequence which is recognized by the DNA binding domain of the transactivation fusion protein, and wherein binding of the transactivation fusion protein increases transcription of the heterologous promoter. The heterologous tetracycline promoter initially developed for S. cerevisiae gene expression, contains an ADHl 3′ terminator sequence, variable number of copies of the tetracycline operator sequence (2, 4, or 7 copies), and the CYC1 basal promoter. The tetracycline promoter has been subcloned adjacent to both CaHIS3 and CaSAT1 selectable markers in the orientation favoring tetracycline promoter-dependent regulation when placed immediately upstream the open reading frame of the gene of interest. PCR amplification of the CaHIS3-Tet promoter cassette incorporates 65 bp of flanking sequence homologous to the promoter sequence around nucleotide positions −200 and −1 (relative to the start codon) of the target gene, thereby producing a conditional promoter replacement fragment for transformation. When transformed into a C. albicans strain made heterozygous as described in Section 5.1.1 using the CaSAT1 disruption cassette, homologous recombination between the promoter replacement fragment and the promoter of the wild type allele generates a strain in which the remaining wild type gene is conditionally regulated gene by the tetracycline promoter. Transformants are selected as His prototrophs and verified by Southern blot and PCR analysis.

[0068] In this particular embodiment, the promoter is induced in the absence of tetracycline, and repressed by the presence of tetracycline. Analogs of tetracycline, including but not limited to chlortetracycline, demeclocycline, doxycycline, meclocycline, methocycline, minocycline hydrochloride, anhydrotetracycline, and oxytetracycline, can also be used to repress the expression of the modified gene allele in a GRACE strain.

[0069] The present invention also encompasses alternative variants of the tetracycline promoter system, based upon a mutated tetracycline repressor (tetR) molecule, designated tetR′, which is activated (i.e. binds to its cognate operator sequence) by binding of the antibiotic effector molecule to promote expression, and is repressed (i.e. does not bind to the operator sequence) in the absence of the antibiotic effectors, when the tetR′ is used instead of, or in addition to, the wild-type tetR. For example, the GRACE method could be performed using tetR′ instead of tetR in cases where repression is desired under conditions which lack the presence of tetracycline, such as shut off of a gene participating in drug transport (e.g. CaCDR1, CaPDR5, or CaMDR1). Also, the GRACE method could be adapted to incorporate both the tetR and tetR′ molecules in a dual activator/repressor system where tetR is fused to an activator domain and tetR′ is fused to a general repressor (e.g. CaSsr6 or CaTup1) to enhance or further repress expression in the presence of the antibiotic effector molecules (Belli et al., 1998, Nucl Acid Res 26:942-947 which is incorporated herein by reference). These methods of providing conditional expression are also contemplated.

[0070] In another embodiment of the invention, the method may also be applied to haploid pathogenic fungi by modifying the single allele of the gene via recombination of the allele with a promoter replacement fragment comprising a nucleotide sequence encoding a heterologous promoter, such that the expression of the gene is conditionally regulated by the heterologous promoter. By repeating this process for a preferred subset of genes in a haploid pathogenic organism, or its entire genome, a collection or a complete set of conditional mutant strains can be obtained. A preferred subset of genes comprises genes that share substantial nucleotide sequence homology with target genes of other organisms, e.g., C. albicans and S. cerevisiae. For example, this variation to the method of the invention may be applied to haploid fungal pathogens including, but not limited to, animal fugal pathogens such as Aspergillus fumigatus, Aspergillus niger, Aspergillus flavis, Candida glabrata, Cryptococcus neoformans, Coccidioides immitis, Exophalia dermatiditis, Fusarium oxysporum, Histoplasma capsulatum, Pneumocystis carinii, Trichosporon beigelii, Rhizopus arrhizus, Mucor rouxii, Rhizomucor pusillus, or Absidia corymbigera, or the plant fungal pathogens, such as Botrytis cinerea, Erysiphe graminis, Magnaporthe grisea, Puccinia recodita, Septoria triticii, Tilletia controversa, Ustilago maydis, or any species falling within the genera of any of the above species.

[0071] The means to achieve conditional expression are not restricted to the tetracycline promoter system and can be performed using other conditional promoters. Such conditional promoter may, for example, be regulated by a repressor which repress transcription from the promoter under particular condition or by a transactivator which increases transcription from the promoter, such as, when in the presence of an inducer. For example, the C. albicans CaPCK1 promoter is not transcribed in the presence of glucose but has a high level of expression in cells grown on other carbon sources, such as succinate, and therefore could also be adopted for conditional expression of the modified allele in a GRACE strain. To this end, it has been shown that both CaHIS1 and CaSAT1 are essential for growth on glucose-containing medium using the CaPCK1 promoter as an alternative to the tetracycline promoter in the above description. In this instance, the CaPCK1 promoter is heterologous to the gene expressed and not to the organism, and such heterologous promoters are also encompassed in the invention. Alternative promoters that could functionally replace the tetracycline promoter include but are not limited to other antibiotic-based regulatable promoter systems (e.g., pristinamycin-induced promoter or PIP) as well as Candida albicans conditionally-regulated promoters such as MET25, MAL2, PHO5, GAL1, 10, STE2, or STE3.

[0072] In a preferred embodiment of the GRACE method, performing the gene disruption first enables heterozygous strains to be constructed and separately collected as a heterozygote strain collection during the process of drug target validation. Such a C. albicans heterozygote strain collection enables drug screening approaches based on haploinsufficiency for validated targets within the collection. As used herein, the term “haploinsufficiency” refers to the phenomenon whereby heterozygous strains for a given gene express approximately half the normal diploid level of a particular gene product. Consequently, these strains provide constructions having a diminished level of the encoded gene product, and they may be used directly in screens for antifungal compounds. Here differential sensitivity of a diploid parent, as compared with its heterozygous derivative, will indicate that a drug is active against the encoded gene product.

[0073] It is clear to those skilled in the art that the order of allele modification followed in this embodiment of the invention is not critical, and that it is feasible to perform these steps in a different order such that the conditional-expressing allele is constructed first and the disruption of the remaining wild type gene allele be performed subsequently. However, where the promoter replacement step is carried out first, care should be taken to delete sequences homologous to those employed in the gene disruption step.

[0074] A specific application of the GRACE method, as used to construct modified alleles of the target gene CaKRE9 is provided in Section 6.

### 5.2.3 Alternative Methods of Conditional Expression

[0075] In other embodiments of the invention, conditional expression could be achieved by means other than the reliance of conditional promoters. For example, conditional expression could be achieved by the replacement of the wild type allele in heterozygous strains with temperature sensitive alleles derived in vitro, and their phenotype would then be analyzed at the nonpermissive temperature. In a related approach, insertion of a ubiquitination signal into the remaining wild type allele to destabilize the gene product during activation conditions can be adopted to examine phenotypic effects resulting from gene inactivation. Collectively, these examples demonstrate the manner in which C. albicans genes can be disrupted and conditionally regulated using the GRACE method.

[0076] In an alternative embodiment of the present invention, a constitutive promoter regulated by an excisable transactivator can be used. The promoter is placed upstream to a target gene to repress expression to the basal level characteristic of the promoter. For example, in a fungal cell, a heterologous promoter containing lexA operator elements may be used in combination with a fusion protein composed of the lexA DNA binding domain and any transcriptional activator domain (e.g. GAL4, HAP4, VP 16) to provide constitutive expression of a target gene. Counterselection mediated by 5-FOA can be used to select those cells which have excised the gene encoding the fusion protein. This procedure enables an examination of the phenotype associated with repression of the target gene to the basal level of expression provided by the lexA heterologous promoter in the absence of a functional transcription activator. The GRACE strains generated by this approach can be used for drug target validation as described in detail in the sections below. In this system, the low basal level expression associated with the heterologous promoter is critical. Thus, it is preferable that the basal level of expression of the promoter is low to make this alternative shut-off system more useful for target validation.

[0077] Alternatively, conditional expression of a target gene can be achieved without the use of a transactivator containing a DNA binding, transcriptional activator domain. A cassette could be assembled to contain a heterologous constitutive promoter downstream of, for example, the URA3 selectable marker, which is flanked with a direct repeat containing homologous sequences to the 5′ portion of the target gene. Additional homologous sequences upstream of the target, when added to this cassette would facilitate homologous recombination and replacement of the native promoter withe above-described heterologous promoter cassette immediately upstream of the start codon of the target gene or open reading frame. Conditional expression is achieved by selecting strains, by using 5-FOA containing media, which have excised the heterologous constitutive promoter and URA3 marker (and consequently lack those regulatory sequences upstream of the target gene required for expression of the gene) and examining the growth of the resulting strain versus a wild type strain grown under identical conditions.

### 5.2.4 GRACE strains of Filamentous Plant Pathogenic Fungi

[0078] In specific embodiments, the methods of identifying drug targets of the invention can be applied to filamentous plant pathogenic fungi. A wide variety of filamentous fungi cause plant diseases; these fungi include species in the genera Ustilago, Fusarium, Colletotrichum, Botrytis, Septoria, Rhizoctonia, Puccinia, Tilletia and Gaemannomyces. In particular, pathogenic fungi of the Fusarium group cause many economically significant diseases on crop plants and some species also cause human infections. For example, plant pathogenic species such as F. graminearum, which causes head scab of wheat, can have devestating economic effects, e.g., $2.6 billion in crop losses over the last 10 years in the U.S.

[0079] A majority of techniques and reagents applicable to genetic engineering in fungi in general are useful in the present invention. The transformation procedure for most filamentous plant pathogenic fungi is based on the protocol developed for Aspergillus nidulans by Yelton et al. (1984. Proc. Natl. Acad. Sci. 81: 1470-1474). The protocol involved creating protoplasts by Novozyme 234 digestion of the cell wall material from mycelium or newly germinated conidial spores. Protoplasts are separated from the cell wall debris by filtratioin, centrifugation and (in some species) gradient purification. DNA is introduced in the presence of CaCl₂ and polyethylene glycol, and protoplasts are regenerated on medium containing an osmotic stabilizer (such as sorbitol). A. nidulans metabolic genes such as TrpC, ArgB and the amdS gene (growth on acetamide) have commonly been used as selectable markers. Metabolic markers for other fungi include the PyrG gene and the gene for nitrate reductase. Dominant selectable markers generally include genes for resistance to hygromycin, benomyl, bialophos, phleomycin and, more recently, pyrithiamine. By far, resistance to hygromycin is the most common selection for obtaining transformants and most vectors are based on the marker developed by Punt et al. (pAN7-1; Gene. 56: 117-124, 1987). Promoters to drive transcription of marker genes include the A. nidulans trpc and gpd promoters although many more of the characterized promoters can be used. Well-studied regulated promoters are available from genes involved in nitrogen metabolism (e.g. see publications by the laboratories of Michael Hynes, George Marzluf and Herb Arst). In addition, regulated promoters have been identified for plant pathogens such as the promoter for the pg1 gene encoding polygalacturonase which is induced upon growth with pectin as the carbon source (Di Pietro and Roncero. 1998. MPMI 11: 91-98.). Generally, targeted integration of transforming DNA occurs at a lower frequency than in S. cerevisiae, but nonetheless sufficient for gene replacement and the GRACE promoter replacement method.

[0080] In preferred embodiments, the invention encompasses modified strains and essential genes of basidiomycetes which comprises, for example, the Ustilago species. In particular, Ustilago maydis (corn smut) is a dimorphic basidiomycete fungus related to many fungal plant pathogens such as the economically important bunts and rusts. Other Ustilago species, such as U. hordei, are common pathogens of small grain cereals such as barley, oats and wheat. In the Ustilago species, the budding form is haploid, unicellular and nonpathogenic; this cell type serves as a genetically tractable model system in which molecular biological methods can readily be applied to identify essential genes (Banuett, F. Annual Reviews in Genetics (1995) 29;179-208). Fusion of two haploid cells of opposite mating type produces a dikaryotic filamentous form which is pathogenic and which requires the host plant for growth. The GRACE method can be adapted to target validation within U. maydis and U. hordei for identifying novel plant pathogen essential targets suitable for agricultural purposes. A comparative analysis with U. maydis and U. hordei may provide a significant advantage because the analyses could help identify essential genes.

[0081] U. maydis and U. hordei are preferred plant pathogenic fungi for constructing GRACE strains for use in the methods of drug targets identification of the invention. In Ustilago species, gene replacement by homologous recombination is efficient. Targeted disruptions using 1 kb flanking sequence yields as high as 70-90% correct integration Protoplast-based transformation protocols typically yield 50-100 colonies/microgram. For example, dominant selectable markers including nourseothricin (NSR), hygromycin B (hygB), phleomycin, benomyl, carboxin, and geneticin, as well as autonomously replicating and integration plasmids are available (Kojic M, and Holloman W K Can J Microbiol 2000 46:333-8, and Gold, S., G. Bakkeren, J. Davies and J. W. Kronstad. 1994. Gene 142: 225-230). Accordingly, standard gene disruption experiments may be performed by those skilled in the art using gene disruption cassettes containing dominant selectable markers suitable for selection in U. maydis (e.g. nourseothricin, hygromycin B, phleomycin, or carboxin dominant selectable markers may be used). These may be amplified by three-way PCR methodology (Wach, A. 1996. Yeast Vol. 12:259-265) to add flanking homologous sequence of suitable length and permit precise gene replacement. Alternatively, auxotrophic markers may be used to select for stable integration of the disruption cassette within any corresponding U. maydis and U. hordei auxotrophic mutant. Alternative recombinant DNA methods to construct suitable U. maydis and U. hordei gene disruption cassettes are also readily available to those skilled in the art.

[0082] Transformation of the resulting disruption cassettes may be performed as described by Wang, et al. 1988. Proc. Natl. Acad. Sci., 85: 865-869. Briefly, transformation in U. maydis involves removing the cell wall with lysing enzyme (e.g. Novozyme or Sigma L1412), adding DNA, treating the cells with PEG and plating on medium with 1M sorbitol and antibiotic selection. Transformants appear in 3 to 5 days. Alternatively, diploid U maydis strains are also publicly available and have been used for the analysis of essential genes (e.g., Holden et al., 1989. EMBO J. 8: 1927-1934.). Specifically, one allele is disrupted in the diploid strain, as outlined above, and the heterozygous strain is injected into corn seedlings. Diploid spores are harvested 14 days later, the spores are germinated to obtain meiotic progeny. Random spore analysis of the resulting progeny is then performed whereby haploid strains are screened for the absence of any identifiable disrupted allele within the population. A statistical analysis may then be performed to determine the essentiality of the examined gene based on the absence of identfying any viable haploid strains maintaining the deletion allele.

[0083] PCR-based promoter replacement experiments using the GRACE regulatable promoter system in U. maydis may be performed by those skilled in the art by first constructing a functional transactivator protein which regulates the GRACE tetracycline promoter. The transactivator protein must be constitutively expressed at high levels. Possible U. maydis regulatory sequence includes the UmTEF1 and UmHSP70 promoters and their respective 3′UTR sequence. The resulting transactivator may be subcloned into a suitable U. maydis plasmid (e.g., pCM54; Tsukuda, et al., 1988. Mol. Cell. Biol. 8:3703-3709.) containing a dominant selectable marker (e.g. HygB) and transformed into any U. maydis homothalic wild-type strain (e.g. 518 (a2 b2) and 521 (a1 b1) (Banuett, F. Trends in Genetics (1992) 8:174-180. Alternatively, a number U. maydis and U. hordei strains containing stable auxotrophic mutations are publicly available and may be used in conjunction with cognate auxotrophic marker cassettes to introduce and stably express the transactivator protein.

[0084] As U. maydis and U. hordei are haploid fungal organisms, the GRACE methodology may then be applied as a single step involving precise promoter replacement using a tetracycline promoter replacement cassette. Preferably, this may be performed using 3-way PCR products comprising a NSR dominant selectable marker fused to the Tet promoter and flanked with appropriate homologous sequence and transforming the promoter replacement cassette into a U. maydis strain constitutively expressing the Tet transactivator protein. Alternative dominant selectable markers may also be employed. Precise replacement by homologous recombination between the wild type promoter and the dominant marker-fused Tet conditional promoter facilitates conditional mutant U. maydis strain construction in a single step. Correct integration of the promoter replacement cassette may be experimentally determined by PCR-mediated genotyping and/or Southern blot analysis.

[0085] Alternatively endogenous regulatable promoters may be applied to constructing conditional mutant strains of U. maydis. Preferable regulatable promoters which may be used include, but are not restricted to, the crg1 gene promoter which is regulated by carbon source (Bottin, A., Kamper, J. and Kahmann, R. Mol. Gen. Genet. 253: 342-352 (1996) and the nar1 gene promoter (nitrate reductase) has also been developed for regulating gene expression (Brachmann, A. et al. 2001. Mol. Microbiol. 42: 1047-1063).

[0086] U. hordei has a very similar life cycle when compared with U. maydis except that the fungus grows more slowly in culture and crosses require the complete growth cycle of the barley plant (2 months) to complete. U. hordei is closely related to a large group of Ustilago species that cause economically more important diseases on small grain cereals. These other species include U. tritici, U. nuda, U. avenae and U. kolleri. U. hordei which are amenable to the methods of the invention also shows remarkably similarities to the bunt pathogens that cause important cereal diseases. Haploid and stable diploid strains of U hordei are available and formation of stable U. hordei diploids (Int. J. Plant Sci. 155: 15-22) offers the ability to evaluate gene essentiality by random spore analysis as described above for U. maydis.

[0087] Gene disruption in U. hordei is accomplished in an identical fashion to that of U maydis and the common selectable markers (e.g., hygromycin resistance) function in both species (Bakkeren, G. and J. Kronstad. 1996. Genetics 143: 1601-1613.). Gene replacement has been demonstrated for several genes at the mating type locus (Lee, N., G. Bakkeren, K. Wong, J. E. Sherwood and J. W. Kronstad. 1999. Proc. Natl. Acad. Sci., USA. 96: 15026-15031.). One minor technical difference in the transformation of U. hordei, compared with U. maydis, is that electroporation enhances the uptake of DNA in U. hordei. Preferred target genes for use in construction of GRACE strains include pan1 which participates in pantothenic acid biosynthesis (Bakkeren, G., and J. W. Kronstad. 1993. The Plant Cell 5: 123-136) and fill encoding a Gα subunit (Lichter A, Mills D. 1997. Mol Gen Genet. 256: 426-435)

[0088] In various embodiments, the hph gene isolated from E. coli, encoding hygromycin resistance, can be used generally as a selectable marker and GUS can be used as a reporter gene. Non-limiting examples of useful recombinant regulatable gene expression systems include the following: F. oxysporum panC promoter induced by steroidal glycoalkaloid alpha-tomatine (Perez-Espinosa et al.,: Mol Genet Genomics 2001 July;265(5):922-9); Ustilago maydis hsp70-like gene promoter in a high-copy number autonomously replicating expression vector (Keon et al., Antisense Nucleic Acid Drug Dev 1999 February;9(1):101-4); Cochliobolus heterostrophus transient and stable gene expression systems using P1 or GPD 1 (glyceraldehyde 3 phosphate dehydrogenase) promoter of C. heterostrophus or GUS or hygromycin B phosphotransferase gene (hph) of E. coli (Monke et al., Mol Gen Genet 1993 October;241(1-2):73-80); Rhynchosporium secalis (barley leaf scald fungus) transformed to hygromycin-B and phleomycin resistance using the hph gene from E. coli and the ble gene from Streptoalloteichus hindustanus under the control of Aspergillus nidulans promoter and terminator sequences, plasmid DNA introduced into fungal protoplasts by PEG/CaCl₂ treatment (Rohe et al., Curr Genet 1996 May;29(6):587-90). Pathogens of banana and plantain (Musa spp.) Mycosphaerella fijiensis and Mycosphaerella musicola, and Mycosphaerella eumusae can be transformed as taught in Balint-Kurti et al., FEMS Microbiol Lett 2001 Feb. 5;195(1):9-15. Gibberella pulicaris (Fusarium sambucinum) a trichothecene-producing plant pathogen can be transformed with three different vectors: cosHyg1, pUCH1, and pDH25, all of which carry hph (encoding hygromycin B phosphotransferase) as the selectable marker (Salch et al., Curr Genet 1993;23(4):343-50). Leptosphaeria maculans, a fungal pathogen of Brassica spp. can be transformed with the vector pAN8-1, encoding phleomycin resistance; protoplasts can be retransformed using the partially homologous vector, pAN7-1 which encodes hygromycin B resistance. Farman et al., Mol Gen Genet 1992 January;231(2):243-7. Cryphonectria parasitica; targeted disruption of enpg-1 of this chestnut blight fungus was accomplished by homologous recombination with a cloned copy of the hph gene of Escherichia coli inserted into exon 1, see Gao et al., Appl Environ Microbiol 1996 June;62(6):1984-90.

[0089] Another example, Glomerella cingulata f sp. phaseoli (Gcp) was transformed using either of two selectable markers: the amdS+gene of Aspergillus nidulans, which encodes acetamidase and permits growth on acetamide as the sole nitrogen source and the hygBR gene of Escherichia coli which permits growth in the presence of the antibiotic Hy. The amdS+ gene functioned in Gcp under control of A. nidulans regulatory signals and hygBR was expressed after fusion to a promoter from Cochliobolus heterostrophus, another filamentous ascomycete. Protoplasts to be transformed were generated with the digestive enzyme complex Novozym 234 and then were exposed to plasmid DNA in the presence of 10 mM CaCl₂ and polyethylene glycol. Transformation occurred by integration of single or multiple copies of either the amdS+ or hygBR plasmid into the fungal genome. (Rodriquez et al., Gene 1987;54(1):73-81); integration vectors for homologous recombination; deletion studies demonstrated that 505 bp (the minimum length of homologous promoter DNA analysed which was still capable of promoter function) was sufficient to target integration events. Homologous integration of the vector resulted in duplication of the gdpA promoter region. (Rikkerink et al., Curr Genet 1994 March;25(3):202-8).

### 5.3 Identification of Essential Genes and Virulence Genes

### 5.3.1 Essential Genes

[0090] The present invention provides methods for determining whether the gene that has been modified in a GRACE strain is an essential gene or a virulence gene in a pathogenic organism of interest. To determine whether a gene is an essential gene in an organism, a GRACE strain containing the modified alleles of the gene is cultured under conditions wherein the second modified allele of the gene which is under conditional expression, is substantially underexpressed or not expressed. The viability and/or growth of the GRACE strain is compared with that of a wild type strain cultured under the same conditions. A loss or reduction of viability or growth indicates that the gene is essential to the survival of a pathogenic fungus. Accordingly, the present invention provides a method for identifying essential genes in a diploid pathogenic organism comprising the steps of culturing a plurality of GRACE strains under culture conditions wherein the second allele of each of the gene modified in the respective GRACE strain is substantially underexpressed or not expressed; determining viability and/or growth indicator(s) of the cells; and comparing that with the viability and/or growth indicator(s) of wild type cells. The level of expression of the second allele can be less than 50% of the non-modified allele, less than 30%, less than 20%, and preferably less than 10%. Depending on the heterologous promoter used, the level of expression can be controlled by, for example, antibiotics, metal ions, specific chemicals, nutrients, pH, temperature, etc.

[0091] Candida albicans is used herein as an example which has been analyzed by the GRACE methodology.

[0092] For example, C. albicans conditional gene expression using the GRACE method was performed using CaKRE1, CaKRE5, CaKRE6, and CaKRE9 (FIG. 3). CaKRE5, CaKRE6, and CaKRE9 are predicted to be essential or conditionally essential (CaKRE9 null strains are nonviable on glucose but viable on galactose), in C. albicans as demonstrated by gene disruption using the Ura blaster method. CaKRE1 has been demonstrated as a nonessential gene using the Ura blaster method in C. albicans. Strains heterozygous for the above genes were constructed by PCR-based gene disruption method using the CaSAT1 disruption cassette followed by tetracycline regulated promoter replacement of the native promoter of the wild type allele. Robust growth of each of these strains suggests expression proceeds normally in the absence of tetracycline. When tetracycline is added to the growth medium, expression of these tetracycline promoter-regulated genes is greatly reduced or abolished. In the presence of tetracycline, the GRACE strain cells containing each one of the three essential C. albicans genes cited above stop growing. As expected, only the CaKRE1 GRACE strain demonstrates robust growth despite repression of CaKRE1 expression.

[0093] To further examine the utility of the GRACE method in target validation, growth of four additional GRACE strains controlling expression of the known essential genes CaTUB1, CaALG7, CaAUR1, and CaFKS1, as well as the predicted essential gene CaSAT2, and CaKRE1 were compared under inducing versus repressing conditions (FIG. 4). As expected, GRACE strains of CaTUB1, CaALG7, CaAUR1 and CaFKS1 failed to grow under repressing conditions, unlike the non-essential CaKRE1 GRACE strain. Furthermore, as predicted, the CaSAT2 GRACE strain demonstrates essentiality of this gene in C. albicans. The CaSAT2 gene, which has been engineered as a dominant selectable marker for use in C. albicans, is a C. albicans gene that is homologous to a S. cerevisiae gene but is unrelated to the Sat1 gene of E. coli.

[0094] In all cases based on other disruption data that have been generated, this is the expected response if the tetracycline regulated gene is repressed to a level where it is nonfunctional in the presence of tetracycline. Furthermore, in applying the GRACE methodology of conditional gene disruption to two additional C. albicans genes (CaYPD1, and CaYNL194c) whose S. cerevisiae counterpart is known not to be essential, no inhibition of growth was observed when these strains were incubated in the presence of tetracycline. These results establish that the method of conditional gene expression using a GRACE strain is a reliable indicator of gene essentiality.

[0095] Furthermore, the utility of the present method, as a rapid and accurate means to identifying the complete set of essential genes in C. albicans, has been demonstrated by an analysis of the null phenotype of a large number of genes using the GRACE two-step method of gene disruption and conditional expression. Target genes were selected as being fungal specific and essential. Such genes are referred to as target essential genes in the screening assays described below.

[0096] URA blaster-based gene disruption experiments have been reported for at least 89 genes, of which 13 genes were presumed to be essential, based on the inability to construct homozygous deletion strains. The 13 genes are CaCCT8 (Rademacher et al., Microbiology, UK 144, 2951-2960 (1998)); CaFKS1 (Mio et al., J. Bacteriol, 179, 4096-105 (1997); and Douglas, et al., Antimicrob Agents Chemother 41, 2471-9 (1997)); CaHSP90 (Swoboda et al., Infect Immun 63, 4506-14 (1995)); CaKRE6 (Mio et al., J. Bacteriol 179, 2363-72 (1997)); CaNMT1 (Weinberg et al., Mol Microbiol 16, 241-50 (1995)); CaPRS1 (Payne et al., J. Med. Vet. Mycol. 35, 305-12 (1997)); CaPSA1 (Care et al., Mol Microbiol 34, 792-798 (1999)); CaRAD6 (Care et al., Mol Microbiol 34, 792-798 (1999)); CaSEC4 (Mao et al., J. Bacteriol 181, 7235-7242 (1999)); CaSEC14 (Monteoliva et al., Yeast 12, 1097-105 (1996)); CaSN1 (Petter et al., Infect Immun. 65, 4909-17 (1997)); CaTOP2 (Keller, et al., Biochem J., 329-39 (1997)); and CaEFT2 (Mendoza et al., Gene 229, 183-1991 (1999)). These 13 putatively essential genes and CaTUB1, CaALG1, and CaAUR1 of C. albicans are not initially identified by the GRACE method. However, GRACE strains containing modified alleles of any one of these genes and their uses are encompassed by the invention, for example, the CaTUB1, CaALG1, and CaAUR1 GRACE strains in FIG. 4 and the CaKRE6 GRACE strain in FIG. 3. Any of these 17 genes may be included as a control for comparisons in the methods of the invention, or as a positive control for essentiality in the collections of essential genes of the invention. The nucleic acid molecules comprising a nucleotide sequence corresponding to any of these 17 genes may be used in the methods of drug discovery of the invention as drug targets, or they may be included individually or in subgroups as controls in a kit or in a nucleic acid microarray of the invention.

[0097] In contrast to the use of conventional method, application of the GRACE method has already identified significantly more C. albicans essential genes than previously determined by the collective efforts of the entire C. albicans research community. The data presented herewith establishes the speed inherent to the approach of the invention and, therefore, the feasibility of extending the GRACE method to the examination of all the genes of the C. albicans genome, the identification of the complete set of essential genes of this diploid fungal pathogen, and its application to other species.

[0098] An alternative method is available for assessing the essentiality of the modified gene in a GRACE strain. According to the invention, repression of expression of the modified gene allele within a GRACE strain may be achieved by homologous recombination-mediated excision of the gene encoding the transactivator protein. In a preferred embodiment, where conditional expression of a target gene is achieved using the tetracycline-regulated promoter, constitutive expression (under nonrepressing conditions) may be repressed by homologous recombination-mediated excision of the transactivator gene (TetR-GAL4AD). In this way, an absolute achievable repression level is produced independently of that produced by tetracycline-mediated inactivation of the transactivator protein. Excision of the transactivator gene is made possible by virtue of the selectable marker and integration strategy used in GRACE strain construction. Stable integration of the CaURA3-marked plasmid containing the TetR-GAL4AD transactivator gene into the CaLEU2 locus results in a tandem duplication of CaLEU2 flanking the integrated plasmid. Counterselection on 5-FOA-containing medium can then be performed to select for excision of the CaURA3-marked transactivator gene and to directly examine whether this alternative repression strategy reveals the target gene to be essential.

[0099] Three examples of genes defined as essential on 5-FOA containing medium but lacking any detectable growth impairment on tetracycline supplemented medium are the genes, CaYCL052c, CaYNL194c and CaYJR046c. Presumably, this is due to the target gene exhibiting a lower basal level of expression under conditions where the transactivator gene has been completely eliminated than its gene product incompletely inactivated by addition of tetracycline. Thus, the GRACE method offers two independent approaches for the determination of whether or not a given gene is essential for viability of the host strain.

### 5.3.2 Virulence/Pathogenicity Genes

[0100] The present invention also provides methods of using the GRACE strains of a diploid pathogenic organism to identify virulence/pathogenicity genes. In addition to uncovering essential genes of a pathogenic organism, the GRACE methodology enables the identification of other genes and gene products potentially relevant to the screening of drugs useful for the treatment of diseases caused by the pathogenic organism. Nonessential genes and their gene products of a pathogen which nevertheless display indispensable roles in the pathogenesis process, may therefore serve as potential drug targets for prophylactic drug development and could be used in combination with existing cidal therapeutics to improve treatment strategies. Thus, genes and their products implicated in virulence and/or pathogenicity represent another important class of potential drug targets. Moreover, some of the genes implicated in virulence and pathogenicity may be species-specific, and unique to a particular strain of pathogen. It has been estimated that approximately 6-7% of the genes identified through the C. albicans sequencing project are absent in S. cerevisiae. This represents as many as 420 Candida albicans-specific genes which potentially participate in the process of pathogenesis or virulence. Such a large scale functional evaluation of this gene set can only be achieved using the GRACE methodology of the invention.

[0101] Although essential genes provide preferred targets, value would also be placed on those nonessential C. albicans specific genes identified. The potential role of nonessential C. albicans-specific genes in pathogenesis may be evaluated and prioritized according to virulence assays (e.g. buccal epithelial cell adhesion assays and macrophage assays) and various C. albicans infection studies (e.g. oral, vaginal, systemic) using mouse or other animal models. In the same manner described above for essential genes, it is equally feasible to demonstrate whether nonessential genes comprising the GRACE strain collection are required for pathogenicity in a cellular assay or in a mouse model system. Accordingly, GRACE strains that fail to cause fungal infection in mice under conditions of gene inactivation by tetracycline (or alternative gene inactivation means) define the GRACE virulence/pathogenicity subset of genes. More defined subsets of virulence/pathogenicity genes, for example those genes required for particular steps in pathogenesis (e.g. adherence or invasion) can be determined by applying the GRACE pathogenicity subset of strains to in vitro assays which measure the corresponding process. For example, examining GRACE pathogenicity strains in a buccal adhesion or macrophage assay by conditional expression of individual genes would identify those pathogenicity factors required for adherence or cell invasion respectively. Moreover, essential genes that display substantially reduced virulence and growth rate when only partially inactivated represent “multifactorial” drug targets for which even minimally inhibitory high specificity compounds would display therapeutic value.

[0102] Accordingly, to determine whether a gene contributes toward the virulence/pathogenicity of a pathogenic organism in a host, a GRACE strain of the pathogen containing the modified alleles of the gene is allowed to infect host cells or animals under conditions wherein the second modified allele of the gene which is under conditional expression, is substantially underexpressed or not expressed. After the host cells and/or animals have been contacted with the GRACE strain for an appropriate period of time, the condition of the cells and/or animals is compared with cells and/or animals infected by a wild type strain under the same conditions. Various aspects of the infected cell's morphology, physiology, and/or biochemistry can be measured by methods known in the art. When an animal model is used, the progression of the disease, severity of the symptoms, and/or survival of the host can be determined. Any loss or reduction of virulence or pathogenicity displayed by the GRACE strain indicates that the gene modified in the strain contributes to or is critical to the virulence and/or pathogenicity of the virus. Such genes are referred to as target virulence genes in the screening assays described below.

[0103] In another aspect of the present invention, GRACE methodology can be used for the identification and delineation of genetic pathways known to be essential to the development of pathogenicity. For example, extensive work in S. cerevisiae has uncovered a number of processes including cell adhesion, signal transduction, cytoskeletal assembly, that play roles in the dimorphic transition between yeast and hyphal morphologies. Deletion of orthologous genes participating in functionally homologous cellular pathways in pathogenic fungi such as C. albicans, A. fumigatus, and C. neoformans, has clearly demonstrated a concomitant loss of virulence. Therefore, the use of GRACE strains of orthologous genes found in C. albicans and other pathogenic fungi could rapidly validate potential antifungal drug target genes whose inactivation impairs hyphal development and pathogenicity.

### 5.3.3 Validation of Genes Encoding Drug Targets

[0104] Target gene validation refers to the process by which a gene product is identified as suitable for use in screening methods or assays in order to find modulators of the function or structure of that gene product. Criteria used for validation of a gene product as a target for drug screening, however, may be varied depending on the desired mode of action that the compounds sought will have, as well as the host to be protected.

[0105] In one aspect of the present invention, a set of GRACE strains identified and grouped as having only modified alleles of essential genes can be used directly for drug screening.

[0106] In another aspect, the initial set of essential genes is further characterized using, for example, nucleotide sequence comparisons, to identify a subset of essential genes which include only those genes specific to fungi—that is, a subset of genes encoding essential genes products which do not have homologs in a host of the pathogen, such as humans. Modulators, and preferably inhibitors, of such a subset of genes in a fungal pathogen of humans would be predicted to be much less likely to have toxic side effects when used to treat humans.

[0107] Similarly, other subsets of the larger essential gene set could be defined to include only those GRACE strains carrying modified allele pairs that do not have a homologous sequence in one or more host (e.g., mammalian) species to allow the detection of compounds expected to be used in veterinary applications. In addition, using other homology criteria, a subset of GRACE strains could be identified that would be used for the detection of anti-fungal compounds active against agricultural pathogens, inhibiting targets that do not have homologs in the crop to be protected.

[0108] Current C. albicans gene disruption strategies identify nonessential genes and permit the inference that other genes are essential, based on a failure to generate a homozygous null mutant. The null phenotype of a drug target predicts the absolute efficaciousness of the “perfect” drug acting on this target. For example, the difference between a cidal (cell death) versus static (inhibitory growth) null terminal phenotype for a particular drug target. Gene disruption of CaERG11, the drug target of fluconazole, is presumed to be essential based on the failure to construct a homozygous CaERG11 deletion strain using the URA blaster method. However, direct evaluation of its null phenotype being cidal or static could not be performed in the pathogen, and only after the discovery of fluconazole was it possible to biochemically determine both the drug, and presumably the drug target to be static rather than as cidal. Despite the success fluconazole enjoys in the marketplace, its fungistatic mode of action contributes to its primary limitation, i.e., drug resistance after prolonged treatment. Therefore, for the first time, the ability to identify and evaluate cidal null phenotypes for validated drug targets within the pathogen as provided by the invention, now enables directed strategies to identifying antifungal drugs that specifically display a fungicidal mode of action.

[0109] Using a single GRACE strain or a desired collection of GRACE strains comprising essential genes, one or more target genes can be directly evaluated as displaying either a cidal or static null phenotype. This is determined by first incubating GRACE strains under repressing conditions for the conditional expression of the second allele for varying lengths of time in liquid culture, and measuring the percentage of viable cells following plating a defined number of cells onto growth conditions which relieve repression. The percentage of viable cells that remain after return to non-repressing conditions reflects either a cidal (low percent survival) or static (high percent survival) phenotype. Alternatively, vital dyes such as methylene blue or propidium iodide could be used to quantify percent viability of cells for a particular strain under repressing versus inducing conditions. As known fungicidal drug targets are included in the GRACE strain collection (e.g CaAUR1), direct comparisons can be made between this standard fungicidal drug target and novel targets comprising the drug target set. In this way each member of the target set can be immediately ranked and prioritized against an industry standard cidal drug target to select appropriate drug targets and screening assays for the identification of the most rapid-acting cidal compounds.

### 5.4 Essential Genes and Virulence Genes

### 5.4.1 Nucleic Acids Encoding Targets, Vectors, and Host Cells

[0110] By practice of the methods of the invention, the essentiality and the contribution to virulence of substantially all the genes in the genome of an organism can be determined. The identities of essential genes and virulence genes of a diploid pathogenic organism, such as Candida albicans, once revealed by the methods of the invention, allow the inventors to study their functions and evaluate their usefulness as drug targets. Information regarding the structure and function of the gene product of the individual essential gene or virulence gene allows one to design reagents and assays to find compounds that interfere with its expression or function in the pathogenic organism. Accordingly, the present invention provides information on whether a gene or its product(s) is essential to growth, survival, or proliferation of the pathogenic organism, or that a gene or its product(s) contributes to virulence or pathogenicity of the organism with respect to a host. Based on this information, the invention further provides, in various embodiments, novel uses of the nucleotide and/or amino acid sequences of genes that are essential and/or that contributes to virulence or pathogenicity of a pathogenic organism, for purpose of discovering drugs that act against the pathogenic organism. Moreover, the present invention provides specifically the use of this information to identify orthologs of these essential genes in a non-pathogenic yeast, such as Saccharomyces cerevisiae, and the use of these orthologs in drug screening methods. Although the nucleotide sequence of the orthologs of these essential genes in S. cerevisiae may be known, it was not appreciated that these S. cerevisiae genes can be useful for discovering drugs against pathogenic fungi.

[0111] As used herein, the terms “gene” and “recombinant gene” refer to nucleic acid molecules comprising a nucleotide sequence encoding a polypeptide or a biologically active ribonucleic acid (RNA). The term can further include nucleic acid molecules comprising upstream, downstream, and/or intron nucleotide sequences. The term “open reading frame (ORF),” means a series of nucleotide triplets coding for amino acids without any termination codons and the triplet sequence is translatable into protein using the codon usage information appropriate for a particular organism.

[0112] As used herein, the term “target gene” refers to either an essential gene or a virulence gene useful in the invention, especially in the context of drug screening. The terms “target essential gene” and “target virulence gene” will be used where it is appropriate to refer to the two groups of genes separately. However, it is expected that some genes will contribute to virulence and be essential to the survival of the organism. The target genes of the invention may be partially characterized, fully characterized, or validated as a drug target, by methods known in the art and/or methods taught hereinbelow. As used herein, the term “target organism” refers to a pathogenic organism, the essential and/or virulence genes of which are useful in the invention.

[0113] The term “nucleotide sequence” refers to a heteropolymer of nucleotides, including but not limited to ribonucleotides and deoxyribonucleotides, or the sequence of these nucleotides. The terms “nucleic acid” and “polynucleotide” are also used interchangeably herein to refer to a heteropolymer of nucleotides, which may be unmodified or modified DNA or RNA. For example, polynucleotides can be single-stranded or double-stranded DNA, DNA that is a mixture of single-stranded and double-stranded regions, hybrid molecules comprising DNA and RNA with a mixture of single-stranded and double-stranded regions. In addition, the polynucleotide can be composed of triple-stranded regions comprising DNA, RNA, or both. A polynucleotide can also contain one or modified bases, or DNA or RNA backbones modified for nuclease resistance or other reasons. Generally, nucleic acid segments provided by this invention can be assembled from fragments of the genome and short oligonucleotides, or from a series of oligonucleotides, or from individual nucleotides, to provide a synthetic nucleic acid.

[0114] The term “recombinant,” when used herein to refer to a polypeptide or protein, means that a polypeptide or protein is derived from recombinant (e.g., microbial or mammalian) expression systems. “Microbial” refers to recombinant polypeptides or proteins made in bacterial or fungal (e.g., yeast) expression systems. As a product, “recombinant microbial” defines a polypeptide or protein essentially unaccompanied by associated native glycosylation. Polypeptides or proteins expressed in most bacterial cultures, e.g., E. coli, will be free of glycosylation modifications; polypeptides or proteins expressed in yeast will be glycosylated.

[0115] The term “expression vehicle or vector” refers to a plasmid or phage or virus, for expressing a polypeptide from a nucleotide sequence. An expression vehicle can comprise a transcriptional unit, also referred to as an expression construct, comprising an assembly of (1) a genetic element or elements having a regulatory role in gene expression, for example, promoters or enhancers, (2) a structural or coding sequence which is transcribed into mRNA and translated into protein, and which is operably linked to the elements of (1); and (3) appropriate transcription initiation and termination sequences. “Operably linked” refers to a link in which the regulatory regions and the DNA sequence to be expressed are joined and positioned in such a way as to permit transcription, and ultimately, translation. In the case of C. albicans, due to its unusual codon usage, modification of a coding sequence derived from other organisms may be necessary to ensure a polypeptide having the expected amino acid sequence is produced in this organism. Structural units intended for use in yeast or eukaryotic expression systems preferably include a leader sequence enabling extracellular secretion of translated protein by a host cell. Alternatively, where a recombinant protein is expressed without a leader or transport sequence, it may include an N-terminal methionine residue. This residue may or may not be subsequently cleaved from the expressed recombinant protein to provide a final product.

[0116] The term “recombinant host cells” means cultured cells which have stably integrated a recombinant transcriptional unit into chromosomal DNA or carry stably the recombinant transcriptional unit extrachromosomally. Recombinant host cells as defined herein will express heterologous polypeptides or proteins, and RNA encoded by the DNA segment or synthetic gene in the recombinant transcriptional unit. This term also means host cells which have stably integrated a recombinant genetic element or elements having a regulatory role in gene expression, for example, promoters or enhancers. Recombinant expression systems as defined herein will express RNA, polypeptides or proteins endogenous to the cell upon induction of the regulatory elements linked to the endogenous DNA segment or gene to be expressed. The cells can be prokaryotic or eukaryotic.

[0117] The term “polypeptide” refers to the molecule form by joining amino acids to each other by peptide bonds, and may contain amino acids other than the twenty commonly used gene-encoded amino acids. The term “active polypeptide” refers to those forms of the polypeptide which retain the biologic and/or immunologic activities of any naturally occurring polypeptide. The term “naturally occurring polypeptide” refers to polypeptides produced by cells that have not been genetically engineered and specifically contemplates various polypeptides arising from post-translational modifications of the polypeptide including, but not limited to, proteolytic processing, acetylation, carboxylation, glycosylation, phosphorylation, lipidation and acylation.

[0118] The term “isolated” as used herein refers to a nucleic acid or polypeptide separated from at least one macromolecular component (e.g., nucleic acid or polypeptide) present with the nucleic acid or polypeptide in its natural source. In one embodiment, the polynucleotide or polypeptide is purified such that it constitutes at least 95% by weight, more preferably at least 99.8% by weight, of the indicated biological macromolecules present (but water, buffers, and other small molecules, especially molecules having a molecular weight of less than 1000 daltons, can be present).

[0119] Table II lists a set of fungal specific genes that are demonstrated to be essential in C. albicans when conditionally expressed under the tetracycline repression system in the respective GRACE strains or when the gene encoding the transactivator protein is excised in the respective GRACE strain in a 5-FOA assay.

TABLE II
Sequence identifiers of essential genes and related oligonucleotides

| | | | | | | | DNA | Protein |
|---|---|---|---|---|---|---|---|---|
| Gene Name | KO-Up | KO-Down | Tet-Up | Tet-Down | Primer A | Primer B | Sequence | Sequence |
| CaYER168C | 1 | 1001 | 2001 | 3001 | 4001 | 5001 | 6001 | 7001 |
| CaYLR195C | 2 | 1002 | 2002 | 3002 | 4002 | 5002 | 6002 | 7002 |
| CaYMR079W | 3 | 1003 | 2003 | 3003 | 4003 | 5003 | 6003 | 7003 |
| CaYGL055W | 4 | 1004 | 2004 | 3004 | 4004 | 5004 | 6004 | 7004 |
| CaYNL192W | 5 | 1005 | 2005 | 3005 | 4005 | 5005 | 6005 | 7005 |
| CaYAL040C | 6 | 1006 | 2006 | 3006 | 4006 | 5006 | 6006 | 7006 |
| CaYBL033C | 7 | 1007 | 2007 | 3007 | 4007 | 5007 | 6007 | 7007 |
| CaYBR003W | 8 | 1008 | 2008 | 3008 | 4008 | 5008 | 6008 | 7008 |
| CaYBR004C | 9 | 1009 | 2009 | 3009 | 4009 | 5009 | 6009 | 7009 |
| CaYBR176W | 10 | 1010 | 2010 | 3010 | 4010 | 5010 | 6010 | 7010 |
| CaYCR037C | 11 | 1011 | 2011 | 3011 | 4011 | 5011 | 6011 | 7011 |
| CaYCR053W | 12 | 1012 | 2012 | 3012 | 4012 | 5012 | 6012 | 7012 |
| CaYCR105W | 13 | 1013 | 2013 | 3013 | 4013 | 5013 | 6013 | 7013 |
| CaYDL131W | 14 | 1014 | 2014 | 3014 | 4014 | 5014 | 6014 | 7014 |
| CaYGR175C | 15 | 1015 | 2015 | 3015 | 4015 | 5015 | 6015 | 7015 |
| CaORF6_5297 | 16 | 1016 | 2016 | 3016 | 4016 | 5016 | 6016 | 7016 |
| CaORF6_1529 | 17 | 1017 | 2017 | 3017 | 4017 | 5017 | 6017 | 7017 |
| CaORF6_1625 | 18 | 1018 | 2018 | 3018 | 4018 | 5018 | 6018 | 7018 |
| CaORF6_1762 | 19 | 1019 | 2019 | 3019 | 4019 | 5019 | 6019 | 7019 |
| orf6.2643 | 20 | 1020 | 2020 | 3020 | 4020 | 5020 | 6020 | 7020 |
| orf6.3438 | 21 | 1021 | 2021 | 3021 | 4021 | 5021 | 6021 | 7021 |
| orf6.7805 | 22 | 1022 | 2022 | 3022 | 4022 | 5022 | 6022 | 7022 |
| CaYGR056W | 23 | 1023 | 2023 | 3023 | 4023 | 5023 | 6023 | 7023 |
| CaYMR177W | 24 | 1024 | 2024 | 3024 | 4024 | 5024 | 6024 | 7024 |
| orf6.1514 | 25 | 1025 | 2025 | 3025 | 4025 | 5025 | 6025 | 7025 |
| orf6.2440 | 26 | 1026 | 2026 | 3026 | 4026 | 5026 | 6026 | 7026 |
| orf6.2606 | 27 | 1027 | 2027 | 3027 | 4027 | 5027 | 6027 | 7027 |
| orf6.2955 | 28 | 1028 | 2028 | 3028 | 4028 | 5028 | 6028 | 7028 |
| orf6.3134 | 29 | 1029 | 2029 | 3029 | 4029 | 5029 | 6029 | 7029 |
| orf6.3164 | 30 | 1030 | 2030 | 3030 | 4030 | 5030 | 6030 | 7030 |
| orf6.3430 | 31 | 1031 | 2031 | 3031 | 4031 | 5031 | 6031 | 7031 |
| orf6.3439 | 32 | 1032 | 2032 | 3032 | 4032 | 5032 | 6032 | 7032 |
| orf6.3505 | 33 | 1033 | 2033 | 3033 | 4033 | 5033 | 6033 | 7033 |
| orf6.3644 | 34 | 1034 | 2034 | 3034 | 4034 | 5034 | 6034 | 7034 |
| orf6.3833 | 35 | 1035 | 2035 | 3035 | 4035 | 5035 | 6035 | 7035 |
| orf6.3877 | 36 | 1036 | 2036 | 3036 | 4036 | 5036 | 6036 | 7036 |
| orf6.4056 | 37 | 1037 | 2037 | 3037 | 4037 | 5037 | 6037 | 7037 |
| orf6.4105 | 38 | 1038 | 2038 | 3038 | 4038 | 5038 | 6038 | 7038 |
| orf6.4259 | 39 | 1039 | 2039 | 3039 | 4039 | 5039 | 6039 | 7039 |
| orf6.4442 | 40 | 1040 | 2040 | 3040 | 4040 | 5040 | 6040 | 7040 |
| orf6.4684 | 41 | 1041 | 2041 | 3041 | 4041 | 5041 | 6041 | 7041 |
| orf6.469 | 42 | 1042 | 2042 | 3042 | 4042 | 5042 | 6042 | 7042 |
| orf6.4831 | 43 | 1043 | 2043 | 3043 | 4043 | 5043 | 6043 | 7043 |
| orf6.4861 | 44 | 1044 | 2044 | 3044 | 4044 | 5044 | 6044 | 7044 |
| orf6.5126 | 45 | 1045 | 2045 | 3045 | 4045 | 5045 | 6045 | 7045 |
| orf6.5238 | 46 | 1046 | 2046 | 3046 | 4046 | 5046 | 6046 | 7046 |
| orf6.5327 | 47 | 1047 | 2047 | 3047 | 4047 | 5047 | 6047 | 7047 |
| orf6.537 | 48 | 1048 | 2048 | 3048 | 4048 | 5048 | 6048 | 7048 |
| orf6.5385 | 49 | 1049 | 2049 | 3049 | 4049 | 5049 | 6049 | 7049 |
| orf6.5688 | 50 | 1050 | 2050 | 3050 | 4050 | 5050 | 6050 | 7050 |
| orf6.578 | 51 | 1051 | 2051 | 3051 | 4051 | 5051 | 6051 | 7051 |
| orf6.5807 | 52 | 1052 | 2052 | 3052 | 4052 | 5052 | 6052 | 7052 |
| orf6.5900 | 53 | 1053 | 2053 | 3053 | 4053 | 5053 | 6053 | 7053 |
| orf6.7439 | 54 | 1054 | 2054 | 3054 | 4054 | 5054 | 6054 | 7054 |
| orf6.7856 | 55 | 1055 | 2055 | 3055 | 4055 | 5055 | 6055 | 7055 |
| orf6.8519 | 56 | 1056 | 2056 | 3056 | 4056 | 5056 | 6056 | 7056 |
| orf6.8631 | 57 | 1057 | 2057 | 3057 | 4057 | 5057 | 6057 | 7057 |
| orf6.8738 | 58 | 1058 | 2058 | 3058 | 4058 | 5058 | 6058 | 7058 |
| orf6.9131 | 59 | 1059 | 2059 | 3059 | 4059 | 5059 | 6059 | 7059 |
| orf6.9158 | 60 | 1060 | 2060 | 3060 | 4060 | 5060 | 6060 | 7060 |
| orf6.927 | 61 | 1061 | 2061 | 3061 | 4061 | 5061 | 6061 | 7061 |
| orf6.957 | 62 | 1062 | 2062 | 3062 | 4062 | 5062 | 6062 | 7062 |
| orf6.1741 | 63 | 1063 | 2063 | 3063 | 4063 | 5063 | 6063 | 7063 |
| orf6.1840 | 64 | 1064 | 2064 | 3064 | 4064 | 5064 | 6064 | 7064 |
| orf6.3050 | 65 | 1065 | 2065 | 3065 | 4065 | 5065 | 6065 | 7065 |
| orf6.3551 | 66 | 1066 | 2066 | 3066 | 4066 | 5066 | 6066 | 7066 |
| orf6.4254 | 67 | 1067 | 2067 | 3067 | 4067 | 5067 | 6067 | 7067 |
| orf6.4284 | 68 | 1068 | 2068 | 3068 | 4068 | 5068 | 6068 | 7068 |
| orf6.4978 | 69 | 1069 | 2069 | 3069 | 4069 | 5069 | 6069 | 7069 |
| orf6.5298 | 70 | 1070 | 2070 | 3070 | 4070 | 5070 | 6070 | 7070 |
| orf6.6204 | 71 | 1071 | 2071 | 3071 | 4071 | 5071 | 6071 | 7071 |
| orf6.6912 | 72 | 1072 | 2072 | 3072 | 4072 | 5072 | 6072 | 7072 |
| orf6.7891 | 73 | 1073 | 2073 | 3073 | 4073 | 5073 | 6073 | 7073 |
| orf6.8059 | 74 | 1074 | 2074 | 3074 | 4074 | 5074 | 6074 | 7074 |
| orf6.8865 | 75 | 1075 | 2075 | 3075 | 4075 | 5075 | 6075 | 7075 |
| orf6.8925 | 76 | 1076 | 2076 | 3076 | 4076 | 5076 | 6076 | 7076 |
| orf6.9112 | 77 | 1077 | 2077 | 3077 | 4077 | 5077 | 6077 | 7077 |
| orf6.463 | 78 | 1078 | 2078 | 3078 | 4078 | 5078 | 6078 | 7078 |
| orf6.1034 | 79 | 1079 | 2079 | 3079 | 4079 | 5079 | 6079 | 7079 |
| orf6.1172 | 80 | 1080 | 2080 | 3080 | 4080 | 5080 | 6080 | 7080 |
| orf6.1292 | 81 | 1081 | 2081 | 3081 | 4081 | 5081 | 6081 | 7081 |
| orf6.1768 | 82 | 1082 | 2082 | 3082 | 4082 | 5082 | 6082 | 7082 |
| orf6.1795 | 83 | 1083 | 2083 | 3083 | 4083 | 5083 | 6083 | 7083 |
| orf6.2240 | 84 | 1084 | 2084 | 3084 | 4084 | 5084 | 6084 | 7084 |
| orf6.2287 | 85 | 1085 | 2085 | 3085 | 4085 | 5085 | 6085 | 7085 |
| orf6.2293 | 86 | 1086 | 2086 | 3086 | 4086 | 5086 | 6086 | 7086 |
| orf6.2344 | 87 | 1087 | 2087 | 3087 | 4087 | 5087 | 6087 | 7087 |
| orf6.2403 | 88 | 1088 | 2088 | 3088 | 4088 | 5088 | 6088 | 7088 |
| orf6.2472 | 89 | 1089 | 2089 | 3089 | 4089 | 5089 | 6089 | 7089 |
| orf6.2734 | 90 | 1090 | 2090 | 3090 | 4090 | 5090 | 6090 | 7090 |
| orf6.2791 | 91 | 1091 | 2091 | 3091 | 4091 | 5091 | 6091 | 7091 |
| orf6.2807 | 92 | 1092 | 2092 | 3092 | 4092 | 5092 | 6092 | 7092 |
| orf6.3061 | 93 | 1093 | 2093 | 3093 | 4093 | 5093 | 6093 | 7093 |
| orf6.3260 | 94 | 1094 | 2094 | 3094 | 4094 | 5094 | 6094 | 7094 |
| orf6.3664 | 95 | 1095 | 2095 | 3095 | 4095 | 5095 | 6095 | 7095 |
| orf6.4038 | 96 | 1096 | 2096 | 3096 | 4096 | 5096 | 6096 | 7096 |
| orf6.4043 | 97 | 1097 | 2097 | 3097 | 4097 | 5097 | 6097 | 7097 |
| orf6.4391 | 98 | 1098 | 2098 | 3098 | 4098 | 5098 | 6098 | 7098 |
| orf6.4396 | 99 | 1099 | 2099 | 3099 | 4099 | 5099 | 6099 | 7099 |
| orf6.4550 | 100 | 1100 | 2100 | 3100 | 4100 | 5100 | 6100 | 7100 |
| orf6.4595 | 101 | 1101 | 2101 | 3101 | 4101 | 5101 | 6101 | 7101 |
| orf6.4867 | 102 | 1102 | 2102 | 3102 | 4102 | 5102 | 6102 | 7102 |
| orf6.5010 | 103 | 1103 | 2103 | 3103 | 4103 | 5103 | 6103 | 7103 |
| orf6.5011 | 104 | 1104 | 2104 | 3104 | 4104 | 5104 | 6104 | 7104 |
| orf6.5081 | 105 | 1105 | 2105 | 3105 | 4105 | 5105 | 6105 | 7105 |
| orf6.5082 | 106 | 1106 | 2106 | 3106 | 4106 | 5106 | 6106 | 7106 |
| orf6.5242 | 107 | 1107 | 2107 | 3107 | 4107 | 5107 | 6107 | 7107 |
| orf6.5541 | 108 | 1108 | 2108 | 3108 | 4108 | 5108 | 6108 | 7108 |
| orf6.5614 | 109 | 1109 | 2109 | 3109 | 4109 | 5109 | 6109 | 7109 |
| orf6.5712 | 110 | 1110 | 2110 | 3110 | 4110 | 5110 | 6110 | 7110 |
| orf6.6114 | 111 | 1111 | 2111 | 3111 | 4111 | 5111 | 6111 | 7111 |
| orf6.6245 | 112 | 1112 | 2112 | 3112 | 4112 | 5112 | 6112 | 7112 |
| orf6.6305 | 113 | 1113 | 2113 | 3113 | 4113 | 5113 | 6113 | 7113 |
| orf6.6413 | 114 | 1114 | 2114 | 3114 | 4114 | 5114 | 6114 | 7114 |
| orf6.6671 | 115 | 1115 | 2115 | 3115 | 4115 | 5115 | 6115 | 7115 |
| orf6.7239 | 116 | 1116 | 2116 | 3116 | 4116 | 5116 | 6116 | 7116 |
| orf6.7760 | 117 | 1117 | 2117 | 3117 | 4117 | 5117 | 6117 | 7117 |
| orf6.8296 | 118 | 1118 | 2118 | 3118 | 4118 | 5118 | 6118 | 7118 |
| orf6.8453 | 119 | 1119 | 2119 | 3119 | 4119 | 5119 | 6119 | 7119 |
| orf6.8768 | 120 | 1120 | 2120 | 3120 | 4120 | 5120 | 6120 | 7120 |
| orf6.8998 | 121 | 1121 | 2121 | 3121 | 4121 | 5121 | 6121 | 7121 |
| orf6.9066 | 122 | 1122 | 2122 | 3122 | 4122 | 5122 | 6122 | 7122 |
| orf6.1427 | 123 | 1123 | 2123 | 3123 | 4123 | 5123 | 6123 | 7123 |
| orf6.1462 | 124 | 1124 | 2124 | 3124 | 4124 | 5124 | 6124 | 7124 |
| orf6.1972 | 125 | 1125 | 2125 | 3125 | 4125 | 5125 | 6125 | 7125 |
| orf6.2301 | 126 | 1126 | 2126 | 3126 | 4126 | 5126 | 6126 | 7126 |
| orf6.2830 | 127 | 1127 | 2127 | 3127 | 4127 | 5127 | 6127 | 7127 |
| orf6.3812 | 128 | 1128 | 2128 | 3128 | 4128 | 5128 | 6128 | 7128 |
| orf6.3857 | 129 | 1129 | 2129 | 3129 | 4129 | 5129 | 6129 | 7129 |
| orf6.3863 | 130 | 1130 | 2130 | 3130 | 4130 | 5130 | 6130 | 7130 |
| orf6.3982 | 131 | 1131 | 2131 | 3131 | 4131 | 5131 | 6131 | 7131 |
| orf6.6551 | 132 | 1132 | 2132 | 3132 | 4132 | 5132 | 6132 | 7132 |
| orf6.6663 | 133 | 1133 | 2133 | 3133 | 4133 | 5133 | 6133 | 7133 |
| orf6.7100 | 134 | 1134 | 2134 | 3134 | 4134 | 5134 | 6134 | 7134 |
| orf6.7416 | 135 | 1135 | 2135 | 3135 | 4135 | 5135 | 6135 | 7135 |
| orf6.7605 | 136 | 1136 | 2136 | 3136 | 4136 | 5136 | 6136 | 7136 |
| orf6.8247 | 137 | 1137 | 2137 | 3137 | 4137 | 5137 | 6137 | 7137 |
| CaYFL037W | 138 | 1138 | 2138 | 3138 | 4138 | 5138 | 6138 | 7138 |
| CaYBR023C | 139 | 1139 | 2139 | 3139 | 4139 | 5139 | 6139 | 7139 |
| CaYAR015W | 140 | 1140 | 2140 | 3140 | 4140 | 5140 | 6140 | 7140 |
| CaYBL007C | 141 | 1141 | 2141 | 3141 | 4141 | 5141 | 6141 | 7141 |
| CaYBL011W | 142 | 1142 | 2142 | 3142 | 4142 | 5142 | 6142 | 7142 |
| CaYBL095W | 143 | 1143 | 2143 | 3143 | 4143 | 5143 | 6143 | 7143 |
| CaYBR015C | 144 | 1144 | 2144 | 3144 | 4144 | 5144 | 6144 | 7144 |
| CaYBR043C | 145 | 1145 | 2145 | 3145 | 4145 | 5145 | 6145 | 7145 |
| CaYBR065C | 146 | 1146 | 2146 | 3146 | 4146 | 5146 | 6146 | 7146 |
| CaYBR078W | 147 | 1147 | 2147 | 3147 | 4147 | 5147 | 6147 | 7147 |
| CaYBR081C | 148 | 1148 | 2148 | 3148 | 4148 | 5148 | 6148 | 7148 |
| CaYBR141C | 149 | 1149 | 2149 | 3149 | 4149 | 5149 | 6149 | 7149 |
| CaYBR151W | 150 | 1150 | 2150 | 3150 | 4150 | 5150 | 6150 | 7150 |
| CaYBR221C | 151 | 1151 | 2151 | 3151 | 4151 | 5151 | 6151 | 7151 |
| CaYBR231C | 152 | 1152 | 2152 | 3152 | 4152 | 5152 | 6152 | 7152 |
| CaYBR248C | 153 | 1153 | 2153 | 3153 | 4153 | 5153 | 6153 | 7153 |
| CaYCL009C | 154 | 1154 | 2154 | 3154 | 4154 | 5154 | 6154 | 7154 |
| CaYCL030C | 155 | 1155 | 2155 | 3155 | 4155 | 5155 | 6155 | 7155 |
| CaYCR009C | 156 | 1156 | 2156 | 3156 | 4156 | 5156 | 6156 | 7156 |
| CaYCR059C | 157 | 1157 | 2157 | 3157 | 4157 | 5157 | 6157 | 7157 |
| CaYCR077C | 158 | 1158 | 2158 | 3158 | 4158 | 5158 | 6158 | 7158 |
| CaYCR098C | 159 | 1159 | 2159 | 3159 | 4159 | 5159 | 6159 | 7159 |
| CaYDL137W | 160 | 1160 | 2160 | 3160 | 4160 | 5160 | 6160 | 7160 |
| CaYKL022C | 161 | 1161 | 2161 | 3161 | 4161 | 5161 | 6161 | 7161 |
| CaYNL112W | 162 | 1162 | 2162 | 3162 | 4162 | 5162 | 6162 | 7162 |
| CaYDR497C | 163 | 1163 | 2163 | 3163 | 4163 | 5163 | 6163 | 7163 |
| CaYOR211C | 164 | 1164 | 2164 | 3164 | 4164 | 5164 | 6164 | 7164 |
| CaYML032C | 165 | 1165 | 2165 | 3165 | 4165 | 5165 | 6165 | 7165 |
| CaYMR186W | 166 | 1166 | 2166 | 3166 | 4166 | 5166 | 6166 | 7166 |
| CaYGR189C | 167 | 1167 | 2167 | 3167 | 4167 | 5167 | 6167 | 7167 |
| CaYMR273C | 168 | 1168 | 2168 | 3168 | 4168 | 5168 | 6168 | 7168 |
| CaORF6_6193 | 169 | 1169 | 2169 | 3169 | 4169 | 5169 | 6169 | 7169 |
| CaYJL030W | 170 | 1170 | 2170 | 3170 | 4170 | 5170 | 6170 | 7170 |
| orf6.2443 | 171 | 1171 | 2171 | 3171 | 4171 | 5171 | 6171 | 7171 |
| orf6.2774 | 172 | 1172 | 2172 | 3172 | 4172 | 5172 | 6172 | 7172 |
| orf6.4597 | 173 | 1173 | 2173 | 3173 | 4173 | 5173 | 6173 | 7173 |
| orf6.4658 | 174 | 1174 | 2174 | 3174 | 4174 | 5174 | 6174 | 7174 |
| orf6.4973 | 175 | 1175 | 2175 | 3175 | 4175 | 5175 | 6175 | 7175 |
| CaYDL164C | 176 | 1176 | 2176 | 3176 | 4176 | 5176 | 6176 | 7176 |
| CaYKL173W | 177 | 1177 | 2177 | 3177 | 4177 | 5177 | 6177 | 7177 |
| CaYLR066W | 178 | 1178 | 2178 | 3178 | 4178 | 5178 | 6178 | 7178 |
| CaYMR047C | 179 | 1179 | 2179 | 3179 | 4179 | 5179 | 6179 | 7179 |
| CaYPL237W | 180 | 1180 | 2180 | 3180 | 4180 | 5180 | 6180 | 7180 |
| CaYDR292C | 181 | 1181 | 2181 | 3181 | 4181 | 5181 | 6181 | 7181 |
| CaYDL070W | 182 | 1182 | 2182 | 3182 | 4182 | 5182 | 6182 | 7182 |
| CaYDR098C | 183 | 1183 | 2183 | 3183 | 4183 | 5183 | 6183 | 7183 |
| CaYGR256W | 184 | 1184 | 2184 | 3184 | 4184 | 5184 | 6184 | 7184 |
| orf6.1285 | 185 | 1185 | 2185 | 3185 | 4185 | 5185 | 6185 | 7185 |
| orf6.1715 | 186 | 1186 | 2186 | 3186 | 4186 | 5186 | 6186 | 7186 |
| orf6.1814 | 187 | 1187 | 2187 | 3187 | 4187 | 5187 | 6187 | 7187 |
| orf6.1866 | 188 | 1188 | 2188 | 3188 | 4188 | 5188 | 6188 | 7188 |
| orf6.2277 | 189 | 1189 | 2189 | 3189 | 4189 | 5189 | 6189 | 7189 |
| orf6.2782 | 190 | 1190 | 2190 | 3190 | 4190 | 5190 | 6190 | 7190 |
| orf6.3768 | 191 | 1191 | 2191 | 3191 | 4191 | 5191 | 6191 | 7191 |
| orf6.4635 | 192 | 1192 | 2192 | 3192 | 4192 | 5192 | 6192 | 7192 |
| orf6.8775 | 193 | 1193 | 2193 | 3193 | 4193 | 5193 | 6193 | 7193 |
| orf6.8799 | 194 | 1194 | 2194 | 3194 | 4194 | 5194 | 6194 | 7194 |
| orf6.3529 | 195 | 1195 | 2195 | 3195 | 4195 | 5195 | 6195 | 7195 |
| orf6.3747 | 196 | 1196 | 2196 | 3196 | 4196 | 5196 | 6196 | 7196 |
| orf6.4385 | 197 | 1197 | 2197 | 3197 | 4197 | 5197 | 6197 | 7197 |
| orf6.6051 | 198 | 1198 | 2198 | 3198 | 4198 | 5198 | 6198 | 7198 |
| orf6.6425 | 199 | 1199 | 2199 | 3199 | 4199 | 5199 | 6199 | 7199 |
| orf6.6463 | 200 | 1200 | 2200 | 3200 | 4200 | 5200 | 6200 | 7200 |
| orf6.1509 | 201 | 1201 | 2201 | 3201 | 4201 | 5201 | 6201 | 7201 |
| orf6.2095 | 202 | 1202 | 2202 | 3202 | 4202 | 5202 | 6202 | 7202 |
| orf6.2502 | 203 | 1203 | 2203 | 3203 | 4203 | 5203 | 6203 | 7203 |
| orf6.2905 | 204 | 1204 | 2204 | 3204 | 4204 | 5204 | 6204 | 7204 |
| orf6.3103 | 205 | 1205 | 2205 | 3205 | 4205 | 5205 | 6205 | 7205 |
| orf6.3991 | 206 | 1206 | 2206 | 3206 | 4206 | 5206 | 6206 | 7206 |
| orf6.4264 | 207 | 1207 | 2207 | 3207 | 4207 | 5207 | 6207 | 7207 |
| orf6.4500 | 208 | 1208 | 2208 | 3208 | 4208 | 5208 | 6208 | 7208 |
| orf6.4614 | 209 | 1209 | 2209 | 3209 | 4209 | 5209 | 6209 | 7209 |
| orf6.5556 | 210 | 1210 | 2210 | 3210 | 4210 | 5210 | 6210 | 7210 |
| orf6.5612 | 211 | 1211 | 2211 | 3211 | 4211 | 5211 | 6211 | 7211 |
| orf6.5671 | 212 | 1212 | 2212 | 3212 | 4212 | 5212 | 6212 | 7212 |
| orf6.5731 | 213 | 1213 | 2213 | 3213 | 4213 | 5213 | 6213 | 7213 |
| orf6.6247 | 214 | 1214 | 2214 | 3214 | 4214 | 5214 | 6214 | 7214 |
| orf6.6289 | 215 | 1215 | 2215 | 3215 | 4215 | 5215 | 6215 | 7215 |
| orf6.6391 | 216 | 1216 | 2216 | 3216 | 4216 | 5216 | 6216 | 7216 |
| orf6.6614 | 217 | 1217 | 2217 | 3217 | 4217 | 5217 | 6217 | 7217 |
| orf6.7399 | 218 | 1218 | 2218 | 3218 | 4218 | 5218 | 6218 | 7218 |
| orf6.4390 | 219 | 1219 | 2219 | 3219 | 4219 | 5219 | 6219 | 7219 |
| orf6.406 | 220 | 1220 | 2220 | 3220 | 4220 | 5220 | 6220 | 7220 |
| orf6.3019 | 221 | 1221 | 2221 | 3221 | 4221 | 5221 | 6221 | 7221 |
| orf19.1444 | 222 | 1222 | 2222 | 3222 | 4222 | 5222 | 6222 | 7222 |
| orf19.3545 | 223 | 1223 | 2223 | 3223 | 4223 | 5223 | 6223 | 7223 |
| orf19.1734 | 224 | 1224 | 2224 | 3224 | 4224 | 5224 | 6224 | 7224 |
| orf19.6738 | 225 | 1225 | 2225 | 3225 | 4225 | 5225 | 6225 | 7225 |
| orf19.2709 | 226 | 1226 | 2226 | 3226 | 4226 | 5226 | 6226 | 7226 |
| orf19.2751 | 227 | 1227 | 2227 | 3227 | 4227 | 5227 | 6227 | 7227 |
| orf19.6538 | 228 | 1228 | 2228 | 3228 | 4228 | 5228 | 6228 | 7228 |
| orf19.1084 | 229 | 1229 | 2229 | 3229 | 4229 | 5229 | 6229 | 7229 |
| orf19.1089 | 230 | 1230 | 2230 | 3230 | 4230 | 5230 | 6230 | 7230 |
| orf19.1010 | 231 | 1231 | 2231 | 3231 | 4231 | 5231 | 6231 | 7231 |
| orf19.3956 | 232 | 1232 | 2232 | 3232 | 4232 | 5232 | 6232 | 7232 |
| orf19.2781 | 233 | 1233 | 2233 | 3233 | 4233 | 5233 | 6233 | 7233 |
| orf19.2782 | 234 | 1234 | 2234 | 3234 | 4234 | 5234 | 6234 | 7234 |
| orf19.671 | 235 | 1235 | 2235 | 3235 | 4235 | 5235 | 6235 | 7235 |
| orf19.696 | 236 | 1236 | 2236 | 3236 | 4236 | 5236 | 6236 | 7236 |
| orf19.1528 | 237 | 1237 | 2237 | 3237 | 4237 | 5237 | 6237 | 7237 |
| orf19.4722 | 238 | 1238 | 2238 | 3238 | 4238 | 5238 | 6238 | 7238 |
| orf19.4766 | 239 | 1239 | 2239 | 3239 | 4239 | 5239 | 6239 | 7239 |
| orf19.4778 | 240 | 1240 | 2240 | 3240 | 4240 | 5240 | 6240 | 7240 |
| orf19.4844 | 241 | 1241 | 2241 | 3241 | 4241 | 5241 | 6241 | 7241 |
| orf19.4866 | 242 | 1242 | 2242 | 3242 | 4242 | 5242 | 6242 | 7242 |
| orf19.4887 | 243 | 1243 | 2243 | 3243 | 4243 | 5243 | 6243 | 7243 |
| orf19.4961 | 244 | 1244 | 2244 | 3244 | 4244 | 5244 | 6244 | 7244 |
| orf19.4967 | 245 | 1245 | 2245 | 3245 | 4245 | 5245 | 6245 | 7245 |
| orf19.4563 | 246 | 1246 | 2246 | 3246 | 4246 | 5246 | 6246 | 7246 |
| orf19.1250 | 247 | 1247 | 2247 | 3247 | 4247 | 5247 | 6247 | 7247 |
| orf19.3624 | 248 | 1248 | 2248 | 3248 | 4248 | 5248 | 6248 | 7248 |
| orf19.3536 | 249 | 1249 | 2249 | 3249 | 4249 | 5249 | 6249 | 7249 |
| orf19.3574 | 250 | 1250 | 2250 | 3250 | 4250 | 5250 | 6250 | 7250 |
| orf19.1354 | 251 | 1251 | 2251 | 3251 | 4251 | 5251 | 6251 | 7251 |
| orf19.5214 | 252 | 1252 | 2252 | 3252 | 4252 | 5252 | 6252 | 7252 |
| orf19.2934 | 253 | 1253 | 2253 | 3253 | 4253 | 5253 | 6253 | 7253 |
| orf19.6636 | 254 | 1254 | 2254 | 3254 | 4254 | 5254 | 6254 | 7254 |
| orf19.3367 | 255 | 1255 | 2255 | 3255 | 4255 | 5255 | 6255 | 7255 |
| orf19.4459 | 256 | 1256 | 2256 | 3256 | 4256 | 5256 | 6256 | 7256 |
| orf19.5629 | 257 | 1257 | 2257 | 3257 | 4257 | 5257 | 6257 | 7257 |
| orf19.3022 | 258 | 1258 | 2258 | 3258 | 4258 | 5258 | 6258 | 7258 |
| orf19.6029 | 259 | 1259 | 2259 | 3259 | 4259 | 5259 | 6259 | 7259 |
| orf19.585 | 260 | 1260 | 2260 | 3260 | 4260 | 5260 | 6260 | 7260 |
| orf19.6736 | 261 | 1261 | 2261 | 3261 | 4261 | 5261 | 6261 | 7261 |
| orf19.7017 | 262 | 1262 | 2262 | 3262 | 4262 | 5262 | 6262 | 7262 |
| orf19.7038 | 263 | 1263 | 2263 | 3263 | 4263 | 5263 | 6263 | 7263 |
| orf19.811 | 264 | 1264 | 2264 | 3264 | 4264 | 5264 | 6264 | 7264 |
| orf19.2363 | 265 | 1265 | 2265 | 3265 | 4265 | 5265 | 6265 | 7265 |
| orf19.7323 | 266 | 1266 | 2266 | 3266 | 4266 | 5266 | 6266 | 7266 |
| orf19.3799 | 267 | 1267 | 2267 | 3267 | 4267 | 5267 | 6267 | 7267 |
| orf19.414 | 268 | 1268 | 2268 | 3268 | 4268 | 5268 | 6268 | 7268 |
| orf19.947 | 269 | 1269 | 2269 | 3269 | 4269 | 5269 | 6269 | 7269 |
| orf19.4294 | 270 | 1270 | 2270 | 3270 | 4270 | 5270 | 6270 | 7270 |
| orf19.154 | 271 | 1271 | 2271 | 3271 | 4271 | 5271 | 6271 | 7271 |
| orf19.6851 | 272 | 1272 | 2272 | 3272 | 4272 | 5272 | 6272 | 7272 |
| orf19.7096 | 273 | 1273 | 2273 | 3273 | 4273 | 5273 | 6273 | 7273 |
| orf19.1751 | 274 | 1274 | 2274 | 3274 | 4274 | 5274 | 6274 | 7274 |
| orf19.4176 | 275 | 1275 | 2275 | 3275 | 4275 | 5275 | 6275 | 7275 |
| orf19.3282 | 276 | 1276 | 2276 | 3276 | 4276 | 5276 | 6276 | 7276 |
| orf19.3362 | 277 | 1277 | 2277 | 3277 | 4277 | 5277 | 6277 | 7277 |
| orf19.2238 | 278 | 1278 | 2278 | 3278 | 4278 | 5278 | 6278 | 7278 |
| orf19.2303 | 279 | 1279 | 2279 | 3279 | 4279 | 5279 | 6279 | 7279 |
| orf19.2064 | 280 | 1280 | 2280 | 3280 | 4280 | 5280 | 6280 | 7280 |
| orf19.713 | 281 | 1281 | 2281 | 3281 | 4281 | 5281 | 6281 | 7281 |
| orf19.752 | 282 | 1282 | 2282 | 3282 | 4282 | 5282 | 6282 | 7282 |
| orf19.6707 | 283 | 1283 | 2283 | 3283 | 4283 | 5283 | 6283 | 7283 |
| orf19.1910 | 284 | 1284 | 2284 | 3284 | 4284 | 5284 | 6284 | 7284 |
| orf19.2671 | 285 | 1285 | 2285 | 3285 | 4285 | 5285 | 6285 | 7285 |
| orf19.4011 | 286 | 1286 | 2286 | 3286 | 4286 | 5286 | 6286 | 7286 |
| orf19.6681 | 287 | 1287 | 2287 | 3287 | 4287 | 5287 | 6287 | 7287 |
| orf19.639 | 288 | 1288 | 2288 | 3288 | 4288 | 5288 | 6288 | 7288 |
| orf19.3170 | 289 | 1289 | 2289 | 3289 | 4289 | 5289 | 6289 | 7289 |
| orf19.5250 | 290 | 1290 | 2290 | 3290 | 4290 | 5290 | 6290 | 7290 |
| orf19.2418 | 291 | 1291 | 2291 | 3291 | 4291 | 5291 | 6291 | 7291 |
| orf19.3434 | 292 | 1292 | 2292 | 3292 | 4292 | 5292 | 6292 | 7292 |
| orf19.927 | 293 | 1293 | 2293 | 3293 | 4293 | 5293 | 6293 | 7293 |
| orf19.3533 | 294 | 1294 | 2294 | 3294 | 4294 | 5294 | 6294 | 7294 |
| orf19.944 | 295 | 1295 | 2295 | 3295 | 4295 | 5295 | 6295 | 7295 |
| orf19.6035 | 296 | 1296 | 2296 | 3296 | 4296 | 5296 | 6296 | 7296 |
| orf19.2698 | 297 | 1297 | 2297 | 3297 | 4297 | 5297 | 6297 | 7297 |
| orf19.4929 | 298 | 1298 | 2298 | 3298 | 4298 | 5298 | 6298 | 7298 |
| orf19.3560 | 299 | 1299 | 2299 | 3299 | 4299 | 5299 | 6299 | 7299 |
| orf19.1125 | 300 | 1300 | 2300 | 3300 | 4300 | 5300 | 6300 | 7300 |
| orf19.1485 | 301 | 1301 | 2301 | 3301 | 4301 | 5301 | 6301 | 7301 |
| orf19.5052 | 302 | 1302 | 2302 | 3302 | 4302 | 5302 | 6302 | 7302 |
| orf19.7452 | 303 | 1303 | 2303 | 3303 | 4303 | 5303 | 6303 | 7303 |
| orf19.5065 | 304 | 1304 | 2304 | 3304 | 4304 | 5304 | 6304 | 7304 |
| orf19.4013 | 305 | 1305 | 2305 | 3305 | 4305 | 5305 | 6305 | 7305 |
| orf19.5213 | 306 | 1306 | 2306 | 3306 | 4306 | 5306 | 6306 | 7306 |
| orf19.7567 | 307 | 1307 | 2307 | 3307 | 4307 | 5307 | 6307 | 7307 |
| orf19.5067 | 308 | 1308 | 2308 | 3308 | 4308 | 5308 | 6308 | 7308 |
| orf19.6168 | 309 | 1309 | 2309 | 3309 | 4309 | 5309 | 6309 | 7309 |
| orf19.2439 | 310 | 1310 | 2310 | 3310 | 4310 | 5310 | 6310 | 7310 |

[0120] In one embodiment, the present invention provides the identities of 310 essential genes. Although the nucleotide sequence and/or the reading frame of a number of these genes are known, the fact that these genes are essential to the growth and/or survival of Candida albicans was not known until the inventors' discovery. Thus, the uses of these genes and their gene products based on the inventor's discovery are encompassed by the present invention. Also provided in Table II are SEQ ID NOs: that are used herein to identify the open reading frame, the deduced amino acid sequence and related oligonucleotide sequences for each identified essential gene. To facilitate correlation of the nucleotide sequence of each essential gene with its corresponding amino acid sequence and related oligonucleotide sequences, the sequence identifiers have been organized into eight blocks of each with one thousand SEQ ID numbers. Each block of SEQ ID numbers, which corresponds to a type of sequence, has 310 sequences with SEQ ID NOs., and 689 SEQ ID NOs. with no sequence which serve as place holders. Accordingly, the SEQ ID NO. for each of the eight related sequences of an essential gene are separated by 1000. For example, SEQ ID NO: 1, 1001, 2001, 3001, 4001, 5001, 6001, and 7001 are directed to, respectively, the upstream and downstream knockout (KO) primers, upstream and downstream tet promoter primers, identification primers A and B, the nucleotide sequence of the coding region and the amino acid sequence of one essential gene, and in this example, the essential gene is CaYER168C.

[0121] In accordance with the above numbering scheme, SEQ ID NO: 6001 through to SEQ ID NO: 6310 each identifies a nucleotide sequence of the opening reading frame (ORF) of an identified essential gene. The nucleotide sequences labeled as SEQ ID NO: 6001-6310 were obtained from a Candida albicans genomic sequence database version 6 assembled by the Candida albicans Sequencing Project and is accessible by internet at the web sites of Stanford University and University of Minnesota (See http://www-sequence.stanford.edu:8080/and http://alces.med.umn.edu/Candida.html).

[0122] The predicted amino acid sequence of the identified essential genes are set forth in SEQ ID NO: 7001 through to SEQ ID NO: 7310 which are obtained by conceptual translation of the nucleotide sequences of SEQ ID NO: 6001 through to 6310 once the reading frame is determined. As it is well known in the art, the codon CTG is translated to a serine residue in C. albicans, instead of the usual leucine in other organisms. Accordingly, the conceptual translation of the ORF is performed using the codon usage of C. albicans.

[0123] The DNA sequences were generated by sequencing reactions and may contain minor errors which may exist as misidentified nucleotides, insertions, and/or deletions. However, such minor errors, if present, in the sequence database should not disturb the identification of an ORF as that of an essential gene of the invention. Since sequences of the ORFs are provided herein and can be used individually to uniquely identify the corresponding gene in the C. albicans genome, a clone of the gene corresponding to the ORFs can readily be isolated by any of several art-known methods. The sequencing can then be repeated to confirm the sequence or correct the error(s). The disclosure of the ORFs or a portion thereof essentially provides the complete gene by uniquely identifying the coding sequence in question, and providing sufficient guidance to obtain the complete cDNA or genomic sequence. The uses of an essential gene that corresponds to an ORF identified by the methods of the invention are not affected by the minor errors in the ORF.

[0124] For example, minor sequence errors and variation in splicing do not affect the construction of conditional-expression C. albicans mutant strains or GRACE strains based on the sequences provided herein, and the uses of those strains, since these methods do not require absolute sequence identity between the chromosomal DNA sequences and the sequences of the gene in the primers or recombinant DNA. In some instances, the correct reading frame of the C. albicans gene can be identified by comparing its overall amino acid sequence with known Saccharomyces cerevisiae sequences. Accordingly, the present invention encompasses C. albicans genes which correspond to the ORFs identified in the invention, polypeptides encoded by C. albicans genes which correspond to the ORFs identified in the invention, and the various uses of the polynucleotides and polypeptides of the genes which correspond to the ORFs of the invention. As used herein in referring to the relationship between a specified nucleotide sequence and a gene, the term “corresponds” or “corresponding” indicates that the specified sequence effectively identifies the gene. In general, correspondence is substantial sequence identity barring minor errors in sequencing, allelic variations and/or variations in splicing. Correspondence can be a transcriptional relationship between the gene sequence and the mRNA or a portion thereof which is transcribed from that gene. This correspondence is present also between portions of an mRNA which is not translated into polypeptide and DNA sequence of the gene.

[0125] SEQ ID NO: 1-5310 identify oligonucleotide primers and probes that were designed for and used in the construction of the GRACE strain for the corresponding identified essential gene. (i.e., SEQ ID NO: 1-310 are knockout upstream primers (KO-UP); SEQ ID NO:1001-1310 are knockout downstream primers (KO-Down); SEQ ID NO:2001-2310 are tetracycline promoter upstream primers (Tet-Up); SEQ ID NO:3001-3310 are tetracycline promoter downstream primers (Tet-Down); and SEQ ID NO:4001-4310, and 5001-5310 are primers for identification of the respective GRACE strains (primers A and B respectively). Therefore, each set of oligonucleotides can be used to identify a unique essential gene and a unique GRACE strain, e.g. by hybridization, or PCR.

[0126] The essential genes listed in Table II can be obtained using cloning methods well known to those of skill in the art, and include but are not limited to the use of appropriate probes to detect the genes within an appropriate cDNA or gDNA (genomic DNA) library. (See, for example, Sambrook et al., 1989, Molecular Cloning: A Laboratory Manual, Cold Spring Harbor Laboratories, which is incorporated herein by reference in its entirety.) Probes for the sequences identified herein can be synthesized based on the DNA sequences disclosed herein in SEQ ID NO:6001-6310.

[0127] As used herein, “target gene” (i.e., essential and/or virulence gene) refers to (a) a gene containing at least one of the DNA sequences and/or fragments thereof that are set forth in SEQ ID NO: 6001 through to SEQ ID NO: 6310; (b) any DNA sequence or fragment thereof that encodes the amino acid sequence that are set forth in SEQ ID NO: 7001 through to SEQ ID NO: 7310 using the universal genetic code or the codon usage of C. albicans; (c) any DNA sequence that hybridizes to the complement of the nucleotide sequences set forth in SEQ ID NO:6001 through to SEQ ID NO:6310 under stringent conditions, e.g., hybridization to filter-bound DNA in 6× sodium chloride/sodium citrate (SSC) at about 45° C. followed by one or more washes in 0.2×SSC/0.1% SDS at about 50-65° C., or under highly stringent conditions, e.g., hybridization to filter-bound nucleic acid in 6×SSC at about 45° C. followed by one or more washes in 0.1×SSC/0.2% SDS at about 68° C., or under other hybridization conditions which are apparent to those of skill in the art (see, for example, Ausubel, F. M. et al., eds., 1989, Current Protocols in Molecular Biology, Vol. 1, Green Publishing Associates, Inc. and John Wiley & Sons, Inc., New York, at pp. 6.3.1-6.3.6 and 2.10.3). Preferably, the polynucleotides that hybridize to the complements of the DNA sequences disclosed herein encode gene products, e.g., gene products that are functionally equivalent to a gene product encoded by a target gene.

[0128] As described above, target gene sequences include not only degenerate nucleotide sequences that encode a polypeptide comprising or consisting essentially of one of the amino acid sequences of SEQ ID NO: 7001 through to SEQ ID NO: 7310 in C. albicans, but also degenerate nucleotide sequences that when translated in organisms other than C. albicans, would yield a polypeptide comprising or consisting essentially of one of the amino acid sequences of SEQ ID NO: 7001 through to SEQ ID NO: 7310, or a fragment thereof. One of skill in the art would know how to select the appropriate codons or modify the nucleotide sequences of SEQ ID NO: 6001 through to SEQ ID NO: 6310 when using the target gene sequences in C. albicans or in other organisms. Moreover, the term “target gene”, in certain embodiments, encompasses genes that are naturally occurring in Saccharomyces cerevisiae or variants thereof, that share extensive nucleotide sequence homology with C. albicans genes having one of the DNA sequences that are set forth in SEQ ID NO: 6001 through to SEQ ID NO: 6310, i.e., the orthologs in S. cerevisiae. It is contemplated that methods for drug screening that can be applied to C. albicans genes can also be applied to orthologs of the same genes in the non-pathogenic S. cerevisiae. However, in certain embodiments, target genes excluding genes of Saccharomyces cerevisiae are used.

[0129] In another embodiment, the invention also encompasses the following polynucleotides, host cells expressing such polynucleotides and the expression products of such nucleotides: (a) polynucleotides that encode portions of target gene product that corresponds to its functional domains, and the polypeptide products encoded by such nucleotide sequences, and in which, in the case of receptor-type gene products, such domains include, but are not limited to signal sequences, extracellular domains (ECD), transmembrane domains (TM) and cytoplasmic domains (CD); (b) polynucleotides that encode mutants of a target gene product, in which all or part of one of its domains is deleted or altered, and which, in the case of receptor-type gene products, such mutants include, but are not limited to, mature proteins in which the signal sequence is cleaved, soluble receptors in which all or a portion of the TM is deleted, and nonfunctional receptors in which all or a portion of CD is deleted; and (d) polynucleotides that encode fusion proteins containing a target gene product or one of its domains fused to another polypeptide.

[0130] The invention also includes polynucleotides, preferably DNA molecules, that hybridize to, and are therefore the complements of, the DNA sequences of the target gene sequences. Also included are polynucleotides that hybridize to the complement of the DNA sequences of the target genes. Such hybridization conditions can be highly stringent or less highly stringent, as described above and known in the art. The nucleic acid molecules of the invention that hybridize to the above described DNA sequences include oligodeoxynucleotides (“oligos”) which hybridize to the target gene under highly stringent or stringent conditions. In general, for oligos between 14 and 70 nucleotides in length the melting temperature (Tm) is calculated using the formula:
Tm(° C.)=81.5+16.6(log[monovalent cations (molar)]+0.41 (% G+C)−(500/N)
[0131] where N is the length of the probe. If the hybridization is carried out in a solution containing formamide, the melting temperature may be calculated using the equation:
   Tm(° C.)=81.5+16.6(log[monovalent cations (molar)])+0.41(% G+C)−(0.61) (% formamide)−(500/N).
[0132] where N is the length of the probe. In general, hybridization is carried out at about 20-25 degrees below Tm (for DNA-DNA hybrids) or about 10-15 degrees below Tm (for RNA-DNA hybrids). Other exemplary highly stringent conditions may refer, e.g., to washing in 6×SSC/0.05% sodium pyrophosphate at 37° C. (for 14-base oligos), 48° C. (for 17-base oligos), 55° C. (for 20-base oligos), and 60° C. (for 23-base oligos). Examples of such oligos are set forth in SEQ ID NO:4001 to 4310 and 5001 to 5310.

[0133] These nucleic acid molecules can encode or act as target gene antisense molecules, useful, for example, in target gene regulation and/or as antisense primers in amplification reactions of target gene nucleotide sequences. Further, such sequences can be used as part of ribozyme and/or triple helix sequences, also useful for target gene regulation. Still further, such molecules can be used as components of diagnostic methods whereby the presence of the pathogen can be detected. The uses of these nucleic acid molecules are discussed in detail below.

[0134] Fragments of the target genes of the invention can be at least 10 nucleotides in length. In alternative embodiments, the fragments can be about 20, 30, 40, 50, 60, 70, 80, 90, 100, 200, 300, 400, 500, 1000, 1500, 2000, 2500, 3000, 3500, 4000, 4500, 5000 or more contiguous nucleotides in length. Alternatively, the fragments can comprise nucleotide sequences that encode at least 10, 20, 30, 40, 50, 100, 150, 200, 250, 300, 350, 400, 450 or more contiguous amino acid residues of the target gene products. Fragments of the target genes of the invention can also refer to exons or introns of the above described nucleic acid molecules, as well as portions of the coding regions of such nucleic acid molecules that encode functional domains such as signal sequences, extracellular domains (ECD), transmembrane domains (TM) and cytoplasmic domains (CD).

[0135] To identify and characterize the essential genes of the invention, computer algorithms are employed to perform searches in computer databases and comparative analysis, and the results of such analyses are stored in or displayed on a computer. Such computerized tools for analyzing sequence information are very useful in determining the relatedness of structure of genes and gene products with respect to other genes and gene products in the same species or a different species, and may provide putative functions to novel genes and their products. Biological information such as nucleotide and amino acid sequences are coded and represented as streams of data in a computer. As used here, the term “computer” includes but is not limited to personal computers, data terminals, computer workstations, networks, computerized storage and retrieval systems, and graphical displays for presentation of sequence information, and results of analyses. Typically, a computer comprises a data entry means, a display means, a programmable processing unit, and a data storage means. A “computer readable medium” can be used to store information such as sequence data, lists, and databases, and includes but is not limited to computer memory, magnetic storage devices, such as floppy discs and magnetic tapes, optical-magnetic storage devices, and optical storage devices, such as compact discs. Accordingly, the present invention also encompass a computer or a computer readable medium that comprises at least one nucleotide sequence selected from the group consisting of SEQ ID NO: 1-310, 1001-1310, 2001-2310, 3001-3310, 4001-4310, 5001-5310, and 6001-6310, or at least one amino acid sequence selected from the group consisting of SEQ ID NO: 7001-7310. In preferred embodiments, the sequences are curated and stored in a form with links to other annotations and biological information associated with the sequences. It is also an object of the invention to provide one or more computers programmed with instructions to perform sequence homology searching, sequence alignment, structure prediction and model construction, using the nucleotide sequences of the invention, preferably one or more nucleotide sequences selected from the group consisting of SEQ ID NO: SEQ ID NO: 1-310, 1001-1310, 2001-2310, 3001-3310, 4001-4310, 5001-5310, and 6001-6310, and/or one or more amino acid sequence selected from the group consisting of SEQ ID NO: SEQ ID NO: 7001-7310. Computers that comprise, and that can transmit and distribute the nucleotide and/or amino acid sequences of the invention are also contemplated. Also encompassed by the present invention are the uses of one or more nucleotide sequences selected from the group consisting of SEQ ID NO: 1-310, 1001-1310, 2001-2310, 3001-3310, 4001-4310, 5001-5310, and 6001-6310, and/or one or more amino acid sequence selected from the group consisting of SEQ ID NO: 7001-7310 in computer-assisted methods for identifying homologous sequences in public and private sequence databases, in computer-assisted methods for providing putative functional characteristics of a gene product based on structural homology with other gene products with known function(s), in computer-assisted methods of constructing a model of the gene product. In one specific embodiment, the invention encompasses a method assisted by a computer for identifying a putatively essential gene of a fungus, comprising detecting sequence homology between a fungal nucleotide sequence or fungal amino acid sequence with at least one nucleotide sequence selected from the group consisting of SEQ ID NO: 1-310, 1001-1310, 2001-2310, 3001-3310, 4001-4310, 5001-5310, and 6001-6310, or at least one amino acid sequence selected from the group consisting of SEQ ID NO: 7001-7310.

### 5.4.2 Homologous Target Genes

[0136] In addition to the nucleotide sequences of Candida albicans described above, homologs or orthologs of these target gene sequences, as can be present in other species, can be identified and isolated by molecular biological techniques well known in the art, and without undue experimentation, used in the methods of the invention. For example, homologous target genes in Aspergillus fumigatus, Aspergillus flavus, Aspergillus niger, Coccidiodes immitis, Cryptococcus neoformans, Histoplasma capsulatum, Phytophthora infestans, Puccinia seconditii, Pneumocystis carinii, or any species falling within the genera of any of the above species. Other yeasts in the genera of Candida, Saccharomyces, Schizosaccharomyces, Sporobolomyces, Torulopsis, Trichosporon, Tricophyton, Dermatophytes, Microsproum, Wickerhamia, Ashbya, Blastomyces, Candida, Citeromyces, Crebrothecium, Cryptococcus, Debaryomyces, Endomycopsis, Geotrichum, Hansenula, Kloeckera, Kluveromyces, Lipomyces, Pichia, Rhodosporidium, Rhodotorula, and Yarrowia are also contemplated. Also included are homologs of these target gene sequences can be identified in and isolated from animal fugal pathogens such as Aspergillus fumigatus, Aspergillus niger, Aspergillus flavis, Candida tropicalis, Candida parapsilopsis, Candida krusei, Cryptococcus neoformans, Coccidioides immitis, Exophalia dermatiditis, Fusarium oxysporum, Histoplasma capsulatum, Phneumocystis carinii, Trichosporon beigelii, Rhizopus arrhizus, Mucor rouxii, Rhizomucor pusillus, or Absidia corymbigera, or the plant fungal pathogens, such as Alternaria solanii, Botrytis cinerea, Erysiphe graminis, Magnaporthe grisea, Puccinia recodita, Sclerotinia sclerotiorum, Septoria triticii, Tilletia controversa, Ustilago maydis, Venturia inequalis, Verticullium dahliae or any species falling within the genera of any of the above species.

[0137] Accordingly, the present invention provides polynucleotides that comprise nucleotide sequences allowing them to hybridize to the polynucleotides of the target genes. In one embodiment, the present invention encompasses an isolated nucleic acid comprising a nucleotide sequence that is at least 50% identical to a nucleotide sequence selected from the group consisting of SEQ ID NO: 6001 through to SEQ ID NO: 6310, and that is of a species other than Saccharomyces cerevisiae and/or Candida albicans. In another embodiment, the present invention encompasses an isolated nucleic acid comprising a nucleotide sequence that hybridizes under medium stringency conditions to a second nucleic acid that consists of a nucleotide sequence selected from the group consisting of SEQ ID NO: 6001 through to SEQ ID NO: 6310, and that is of a species other than Saccharomyces cerevisiae and/or Candida albicans. In a specific embodiment, the nucleotide sequence that is at least 50% identical or hybridizes under medium stringency conditions to any one of the sequences SEQ ID NO: 6001 through to SEQ ID NO: 6310 is from Aspergillus fumigatus or Cryptococcus neoformans. In another specific embodiment, the nucleotide sequence that is at least 50% identical or hybridizes under medium stringency conditions to any one of the sequences SEQ ID NO: 6001 through to SEQ ID NO: 6310 is of a species other than Aspergillus fumigatus and/or Cryptococcus neoformans.

[0138] In yet another embodiment, the present invention includes an isolated nucleic acid comprising a nucleotide sequence that encodes a polypeptide the amino acid sequence of which is at least 50% identical to an amino acid sequence selected from the group consisting of SEQ ID NO. 7001 through to 7310, wherein the polypeptide is that of a species other than Saccharomyces cerevisiae and/or Candida albicans. In a specific embodiment, the amino acid sequence that is at least 50% identical to any one of the sequences SEQ ID NO: 7001 through to SEQ ID NO: 7310 is from Aspergillus fumigatus or Cryptococcus neoformans. In another specific embodiment, the amino acid sequence that is at least 50% identical to any one of the sequences SEQ ID NO: 7001 through to SEQ ID NO: 7310 is of a species other than Aspergillus fumigatus and/or Cryptococcus neoformans.

[0139] Although the nucleotide sequences and amino acid sequences of homologs or orthologs of the essential/virulence genes in S. cerevisiae are mostly published, uses of such homologs or orthologs in S. cerevisae in drug screening are mostly not known and are thus specifically provided by the invention. To use such nucleotide and/or amino acid sequences of S. cerevisiae, public databases, such as Stanford Genomic Resources (www-genome.stanford.edu), Munich Information Centre for Protein Sequences (www.mips.biochem.mpg.de), or Proteome (www.proteome.com) may be used to identify and retrieve the sequences. Orthologs of S. cerevisiae can also be identified by hybridization assays using nucleic acid probes consisting of any one of the nucleotide sequences of SEQ ID NO: 6001 to 6310.

[0140] The nucleotide sequences of the invention still further include nucleotide sequences that have at least 40%, 45%, 55%, 60%, 65%, 70%, 75%, 80%, 85%, 90%, 95%, 98% or more nucleotide sequence identity to the nucleotide sequences set forth in SEQ ID NO:6001 through to SEQ ID NO:6310. The nucleotide sequences of the invention also include nucleotide sequences that encode polypeptides having at least 25%, 30%, 40%, 50%, 55%, 60%, 65%, 70%, 75%, 80%, 85%, 90%, 95%, 98% or higher amino acid sequence identity or similarity to the amino acid sequences set forth in SEQ ID NO: 7001 through to 7310.

[0141] To determine the percent identity of two amino acid sequences or of two nucleotide sequences, the sequences are aligned for optimal comparison purposes (e.g., gaps can be introduced in the sequence of a first amino acid or nucleotide sequence for optimal alignment with a second amino acid or nucleotide sequence). The amino acid residues or nucleotides at corresponding amino acid positions or nucleotide positions are then compared. When a position in the first sequence is occupied by the same amino acid residue or nucleotide as the corresponding position in the second sequence, then the molecules are identical at that position. The percent identity between the two sequences is a function of the number of identical positions shared by the sequences (i.e., % identity=number of identical overlapping positions/total number of positions×100%). In one embodiment, the two sequences are the same length.

[0142] The determination of percent identity between two sequences can also be accomplished using a mathematical algorithm and computer-assisted methods. A preferred, non-limiting example of a mathematical algorithm utilized for the comparison of two sequences is the algorithm of Karlin and Altschul (1990) Proc. Natl. Acad. Sci. U.S.A. 87:2264-2268, modified as in Karlin and Altschul (1993) Proc. Natl. Acad. Sci. U.S.A. 90:5873-5877. Such an algorithm is incorporated into the NBLAST and XBLAST programs of Altschul et al., 1990, J. Mol. Biol. 215:403-0. BLAST nucleotide searches can be performed with the NBLAST nucleotide program parameters set, e.g., for score=100, wordlength=12 to obtain nucleotide sequences homologous to a nucleic acid molecules of the present invention. BLAST protein searches can be performed with the XBLAST program parameters set, e.g., to score-50, wordlength=3 to obtain amino acid sequences homologous to a protein molecule of the present invention. To obtain gapped alignments for comparison purposes, Gapped BLAST can be utilized as described in Altschul et al., 1997, Nucleic Acids Res. 25:3389-3402. Alternatively, PSI-BLAST can be used to perform an iterated search which detects distant relationships between molecules (Id.). When utilizing BLAST, Gapped BLAST, and PSI-Blast programs, the default parameters of the respective programs (e.g., of XBLAST and NBLAST) can be used (see, e.g., http://www.ncbi.nlm.nih.gov). Another preferred, non-limiting example of a mathematical algorithm utilized for the comparison of sequences is the algorithm of Myers and Miller, (1988) CABIOS 4:11-17. Such an algorithm is incorporated in the ALIGN program (version 2.0) which is part of the GCG sequence alignment software package. When utilizing the ALIGN program for comparing amino acid sequences, a PAM120 weight residue table, a gap length penalty of 12, and a gap penalty of 4 can be used. Any of these algorithms can be coded as a set of instructions for use in a computer that comprises the sequences of the invention.

[0143] To isolate homologous target genes, the C. albicans target gene sequence described above can be labeled and used to screen a cDNA library constructed from mRNA obtained from the organism of interest. Hybridization conditions should be of a lower stringency when the cDNA library was derived from an organism different from the type of organism from which the labeled sequence was derived. cDNA screening can also identify clones derived from alternatively spliced transcripts in the same or different species. Alternatively, the labeled fragment can be used to screen a genomic library derived from the organism of interest, again, using appropriately stringent conditions. Low stringency conditions will be well known to those of skill in the art, and will vary predictably depending on the specific organisms from which the library and the labeled sequences are derived. For guidance regarding such conditions see, for example, Sambrook et al., 1989, Molecular Cloning, A Laboratory Manual, Cold Spring Harbor Press, N.Y.; and Ausubel et al., 1989, Current Protocols in Molecular Biology, (Green Publishing Associates and Wiley Interscience, N.Y.).

[0144] Further, a homologous target gene sequence can be isolated by performing a polymerase chain reaction (PCR) using two degenerate oligonucleotide primer pools designed on the basis of amino acid sequences within the target gene of interest. The template for the reaction can be cDNA obtained by reverse transcription of mRNA prepared from the organism of interest. The PCR product can be subcloned and sequenced to ensure that the amplified sequences represent the sequences of a homologous target gene sequence.

[0145] The PCR fragment can then be used to isolate a full length cDNA clone by a variety of methods well known to those of ordinary skill in the art. Alternatively, the labeled fragment can be used to screen a genomic library.

[0146] PCR technology can also be utilized to isolate full length cDNA sequences. For example, RNA can be isolated, following standard procedures, from an organism of interest. A reverse transcription reaction can be performed on the RNA using an oligonucleotide primer specific for the most 5′ end of the amplified fragment for the priming of first strand synthesis. The resulting RNA/DNA hybrid can then be “tailed” with guanines using a standard terminal transferase reaction, the hybrid can be digested with RNAase H, and second strand synthesis can then be primed with a poly-C primer. Thus, cDNA sequences upstream of the amplified fragment can easily be isolated. For a review of cloning strategies which can be used, see e.g., Sambrook et al., 1989, Molecular Cloning, A Laboratory Manual, Cold Springs Harbor Press, N.Y.; and Ausubel et al., 1989, Current Protocols in Molecular Biology, (Green Publishing Associates and Wiley Interscience, N.Y.).

[0147] Additionally, an expression library can be constructed utilizing DNA isolated from or cDNA synthesized from the organism of interest. In this manner, gene products made by the homologous target gene can be expressed and screened using standard antibody screening techniques in conjunction with antibodies raised against the C. albicans gene product, as described, below. (For screening techniques, see, for example, Harlow, E. and Lane, eds., 1988, “Antibodies: A Laboratory Manual,” Cold Spring Harbor Press, Cold Spring Harbor). Library clones detected via their reaction with such labeled antibodies can be purified and subjected to sequence analysis by well known methods.

[0148] Alternatively, homologous target genes or polypeptides may be identified by searching a database to identify sequences having a desired level of homology to a target gene or polypeptide involved in proliferation, virulence or pathogenicity. A variety of such databases are available to those skilled in the art, including GenBank and GenSeq. In various embodiments, the databases are screened to identify nucleic acids with at least 97%, at least 95%, at least 90%, at least 85%, at least 80%, at least 70%, at least 60%, at least 50%, or at least 40% identity to a target nucleotide sequence, or a portion thereof. In other embodiments, the databases are screened to identify polypeptides having at least 99%, at least 95%, at least 90%, at least 85%, at least 80%, at least 70%, at least 60%, at least 50%, at least 40% or at least 25% identity or similarity to a polypeptide involved in proliferation, virulence or pathogenicity or a portion thereof.

[0149] Alternatively, functionally homologous target sequences or polypeptides may be identified by creating mutations that have phenotypes by removing or altering the function of a gene. This can be done for one or all genes in a given fungal species including, for example: Saccharomyces cerevisiae, Candida albicans, and Aspergillus fumigatus. Having mutants in the genes of one fungal species offers a method to identify functionally similar genes (orthologs) or related genes (paralogs) in another species, by use of a functional complementation test.

[0150] A library of gene or cDNA copies of messenger RNA of genes can be made from a given species, e.g. Candida albicans, and the library cloned into a vector permitting expression (for example, with the Candida albicans promoters or a Saccharomyces cerevisiae promoter) of the genes in a second species, e.g. Saccharomyces cerevisiae. Such a library is referred to as a “heterologous library.” Transformation of the Candida albicans heterologous library into a defined mutant of Saccharomyces cerevisiae that is functionally deficient with respect to the identified gene, and screening or selecting for a gene in the heterologous library that restores phenotypic function in whole or in part of the mutational defect is said to be “heterologous functional complementation” and in this example, permits identification of gene in Candida albicans that are functionally related to the mutated gene in Saccharomyces cerevisiae. Inherent in this functional-complementation method, is the ability to restore gene function without the requirement for sequence similarity of nucleic acids or polypeptides; that is, this method permits interspecific identification of genes with conserved biological function, even where sequence similarity comparisons fail to reveal or suggest such conservation.

[0151] In those instances in which the gene to be tested is an essential gene, a number of possibilities exist regarding performing heterologous functional complementation tests. The mutation in the essential gene can be a conditional allele, including but not limited to, a temperature-sensitive allele, an allele conditionally expressed from a regulatable promoter, or an allele that has been rendered the mRNA transcript or the encoded gene product conditionally unstable. Alternatively, the strain carrying a mutation in an essential gene can be propagated using a copy of the native gene (a wild type copy of the gene mutated from the same species) on a vector comprising a marker that can be selected against, permitting selection for those strains carrying few or no copies of the vector and the included wild type allele. A strain constructed in this manner is transformed with the heterologous library, and those clones in which a heterologous gene can functionally complement the essential gene mutation, are selected on medium non-permissive for maintenance of the plasmid carrying the wild type gene.

[0152] In the following example, the identification, by functional complementation, of a Candida albicans homolog of a Saccharomyces cerevisiae gene, KRE 9, is described. (Lussier et al. 1998, “The Candida albicans KRE 9 gene is required for cell wall β-1,6-glucan synthesis and is essential for growth on glucose,” Proc. Natl. Acad. Sci. USA 95: 9825-30). The host strain was a Saccharomyces cerevisiae haploid null mutant in KRE 9, kre 9::HIS3, which has a severe growth defect phenotype. The host strain carried a wild type copy of the native Saccharomyces cerevisiae KRE 9 gene on a LYS-2 based pRS317 shuttle vector and was transformed with a Candida albicans genomic library. This heterologous library was constructed using, as a vector, the multicopy plasmid YEp352, which carries the URA3 gene as a selectable marker. To screen for plasmids supporting growth of the kre 9::HIS 3 mutant host, approximately 20,000 colonies capable of growth in the absence of histidine, lysine, and uracil, were replica-plated onto minimal medium containing α-amino adipate as a nitrogen source to allow selection for cells that have lost the LYS2 plasmid-based copy of KRE 9 and that possess a copy of a functionally-complementing Candida albicans ortholog, CaKRE 9. These cells were tested further for loss of the pRS317-KRE 9 plasmid by their inability to grow in the absence of lysine, and YEp352-based Candida albicans genomic DNA was recovered from them. On retransformation of the Saccharomyces cerevisiae kre 9::HIS3 mutant, a specific genomic insert of 8 kb of Candida albicans was recovered that was able to restore growth partially. Following further subcloning using functional complementation for selection, a 1.6 kb DNA fragment was obtained that contained the functional Candida albicans KRE 9 gene.

[0153] A heterologous functional complementation test is not restricted to the exchange of genetic information between Candida albicans and Saccharomyces cerevisiae; functional complementation tests can be performed, as described above, using any pair of fungal species. For example, the CRE1 gene of the fungus Sclerotininia sclerotiorum can functionally complement the creAD30 mutant of the CREA gene of Aspergillus nidulans (see Vautard et al. 1999, “The glucose repressor gene CRE1 from Sclerotininia sclerotiorum is functionally related to CREA from Aspergillus nidulans but not to the Mig proteins from Saccharomyces cerevisiae,” FEBS Lett. 453: 54-58).

[0154] In yet another embodiment, where the source of nucleic acid deposited on a gene expression array and the source of the nucleic acid probe being hybridized to the array are from two different species of organisms, the results allow rapid identification of homologous genes in the two species.

[0155] In yet another embodiment, the invention also encompasses (a) DNA vectors that contain a nucleotide sequence comprising any of the foregoing coding sequences of the target gene and/or their complements (including antisense); (b) DNA expression vectors that contain a nucleotide sequence comprising any of the foregoing coding sequences operably linked with a regulatory element that directs the expression of the coding sequences; and (c) genetically engineered host cells that contain any of the foregoing coding sequences of the target gene operably linked with a regulatory element that directs the expression of the coding sequences in the host cell. Vectors, expression constructs, expression vectors, and genetically engineered host cells containing the coding sequences of homologous target genes of other species (excluding S. cerevisiae) are also contemplated. Also contemplated are genetically engineered host cells containing mutant alleles in homologous target genes of the other species. As used herein, regulatory elements include but are not limited to inducible and non-inducible promoters, enhancers, operators and other elements known to those skilled in the art that drive and regulate expression. Such regulatory elements include but are not limited to the lac system, the trp system, the tet system and other antibiotic-based repression systems (e.g. PIP), the TAC system, the TRC system, the major operator and promoter regions of phage A, the control regions of fd coat protein, and the fungal promoters for 3-phosphoglycerate kinase, acid phosphatase, the yeast mating pheromone responsive promoters (e.g. STE2 and STE3), and promoters isolated from genes involved in carbohydrate metabolism (e.g. GAL promoters), phosphate-responsive promoters (e.g. PHO5), or amino acid metabolism (e.g. MET genes). The invention includes fragments of any of the DNA vector sequences disclosed herein.

[0156] A variety of techniques can be utilized to further characterize the identified essential genes and virulence genes. First, the nucleotide sequence of the identified genes can be used to reveal homologies to one or more known sequence motifs which can yield information regarding the biological function of the identified gene product. Computer programs well known in the art can be employed to identify such relationships. Second, the sequences of the identified genes can be used, utilizing standard techniques such as in situ hybridization, to place the genes onto chromosome maps and genetic maps which can be correlated with similar maps constructed for another organism, e.g., Saccharomyces cerevisiae. The information obtained through such characterizations can suggest relevant methods for using the polynucleotides and polypeptides for discovery of drugs against Candida albicans and other pathogens.

[0157] Methods for performing the uses listed above are well known to those skilled in the art. References disclosing such methods include without limitation “Molecular Cloning: A Laboratory Manual,” 2d ed., Cold Spring Harbor Laboratory Press, Sambrook, J., E. F. Fritsch and T. Maniatis eds., 1989, and “Methods in Enzymology: Guide to Molecular Cloning Techniques,” Academic Press, Berger, S. L. and A. R. Kimmel eds., 1987. Many of the uses of the polynucleotides and polypeptides of the identified essential genes are discussed in details hereinbelow.

### 5.4.3 Target Gene Products

[0158] The target gene products used and encompassed in the methods and compositions of the present invention include those gene products (e.g., RNA or proteins) that are encoded by the target essential gene sequences as described above, such as, the target gene sequences set forth in SEQ ID NO: 6001 through to 6310. In Table II, the amino acid sequences of SEQ ID NO: 7001 through to 7310 are deduced using the codon usage of C. albicans from the respective nucleotide sequences of SEQ ID NO: 6001 through to 6310. However, when expressed in an organism other than C. albicans, protein products of the target genes comprising the amino acid sequences of SEQ ID NO: 7001 through to 7310 may be encoded by nucleotide sequences that are translated using the universal genetic code. One of skill in the art would know the modifications that are necessary to accommodate for such a difference in codon usage.

[0159] In addition, however, the methods and compositions of the invention also use and encompass proteins and polypeptides that represent functionally equivalent gene products. Such functionally equivalent gene products include, but are not limited to, natural variants of the polypeptides comprising or consisting essentially of an amino acid sequence set forth in SEQ ID NO: 7001 through to 7310.

[0160] Such equivalent target gene products can contain, e.g., deletions, additions or substitutions of amino acid residues within the amino acid sequences encoded by the target gene sequences described above, but which result in a silent change, thus producing a functionally equivalent target gene product. Conservative amino acid substitutions can be made on the basis of similarity in polarity, charge, solubility, hydrophobicity, hydrophilicity and/or the amphipathic nature of the residues involved. For example, nonpolar (i.e., hydrophobic) amino acid residues can include alanine (Ala or A), leucine (Leu or L), isoleucine (Ile or I), valine (Val or V), proline (Pro or P), phenylalanine (Phe or F), tryptophan (Trp or W) and methionine (Met or M); polar neutral amino acid residues can include glycine (Gly or G), serine (Ser or S), threonine (Thr or T), cysteine (Cys or C), tyrosine (Tyr or Y), asparagine (Asn or N) and glutamine (Gln or Q); positively charged (i.e., basic) amino acid residues can include arginine (Arg or R), lysine (Lys or K) and histidine (His or H); and negatively charged (i.e., acidic) amino acid residues can include aspartic acid (Asp or D) and glutamic acid (Glu or E).

[0161] In one particular embodiment, a composition comprising a mixture of natural variants of the polypeptides having one of SEQ ID NO: 7001 through to 7310 is provided. Since it is known in the art that, in C. albicans, 99% of the tRNA molecules that recognize the codon CTG is charged with a serine residue, and 1% are charged with a leucine residue, there is a possibility that during biosynthesis, a leucine is incorporated into a growing polypeptide chain. Accordingly, when a nucleotide sequence comprising the codon CTG is translated in C. albicans, a small percentage of the resulting polypeptides may have a leucine residue in positions where a serine residue encoded by CTG (conforming to the codon usage of C. albicans) is expected. The product of translation of such a nucleotide sequence may comprise a mixture of polypeptides with minor leucine/serine variations at positions that correspond to a CTG codon in the nucleotide sequence.

[0162] “Functionally equivalent,” as the term is utilized herein, refers to a polypeptide capable of exhibiting a substantially similar in vivo activity as the Candida albicans target gene product encoded by one or more of the target gene sequences described in Table II. Alternatively, when utilized as part of assays described hereinbelow, the term “functionally equivalent” can refer to peptides or polypeptides that are capable of interacting with other cellular or extracellular molecules in a manner substantially similar to the way in which the corresponding portion of the target gene product would interact with such other molecules. Preferably, the functionally equivalent target gene products of the invention are also the same size or about the same size as a target gene product encoded by one or more of the target gene sequences described in Table II.

[0163] In another embodiment, the invention provides a solid phase comprising one ore more of the target gene products that are present on or immobilized onto at least one surface. Preferably, the target gene products are deposited in a spatially addressable format to form an array (including microarray). Such protein arrays can be used for a variety of purposes, including but not limited to screening for compounds, antibodies, ligands, binding partners, nucleic acids, etc. Preferably, the protein array comprises a plurality of proteins, wherein at least one protein comprises an amino acid sequence or a portion of an amino acid sequence selected from the group consisting of SEQ ID NO:6001 through to SEQ ID NO:6310. The portion of amino acid sequence may comprise at least 20, 30, 40, 50, 60, 70, 80, 90, 100, 150, 200, 250, 300, 350, 400, 450 or more contiguous amino acid residues. Accordingly, fusion proteins, fragments, derivatives, and functionally equivalents of the gene products, including similar proteins from other species, can be present on the array. Methods for making and using such protein arrays are well known in the art, see, for example, U.S. Pat. No. 6,475,808; Sundberg et al. “Spatially-addressable immobiliaztion of macromolecules on solid supports” J. Am. Chem. Soc. 117:12050-12057 (1995); and the articles in “High-Thoughput Proteomics: Protein Arrays”, a supplement to Biotechniques, December 2002 edited by C. Borrebaeck, which are incorporated herein by reference in their entirety.

[0164] The biological function of the target gene products encoded by the C. albicans essential genes of the invention can be predicted by the function of their corresponding homologs in Saccharomyces cerevisiae. Accordingly, the C. albicans gene products of the invention may have one or more of the following biological functions:

[0165] Metabolism: amino-acid metabolism, amino-acid biosynthesis, assimilatory reduction of sulfur and biosynthesis of the serine family, regulation of amino-acid metabolism, amino-acid transport, amino-acid degradation (catabolism), other amino-acid metabolism activities, nitrogen and sulphur metabolism, nitrogen and sulphur utilization, regulation of nitrogen and sulphur utilization, nitrogen and sulphur transport, nucleotide metabolism, purine-ribonucleotide metabolism, pyrimidine-ribonucleotide metabolism, deoxyribonucleotide metabolism, metabolism of cyclic and unusual nucleotides, regulation of nucleotide metabolism, polynucleotide degradation, nucleotide transport, other nucleotide-metabolism activities, phosphate metabolism, phosphate utilization, regulation of phosphate utilization, phosphate transport, other phosphate metabolism activities, C-compound and carbohydrate metabolism, C-compound and carbohydrate utilization, regulation of C-compound and carbohydrate utilization, C-compound, carbohydrate transport, other carbohydrate metabolism activities, lipid, fatty-acid and isoprenoid metabolism, lipid, fatty-acid and isoprenoid biosynthesis, phospholipid biosynthesis, glycolipid biosynthesis, breakdown of lipids, fatty acids and isoprenoids, lipid, fatty-acid and isoprenoid utilization, regulation of lipid, fatty-acid and isoprenoid biosynthesis, lipid and fatty-acid transport, lipid and fatty-acid binding, other lipid, fatty-acid and isoprenoid metabolism activities, metabolism of vitamins, cofactors, and prosthetic groups, biosynthesis of vitamins, cofactors, and prosthetic groups, utilization of vitamins, cofactors, and prosthetic groups, regulation of vitamins, cofactors, and prosthetic groups, transport of vitamins, cofactors, and prosthetic groups, other vitamin, cofactor, and prosthetic group activities, secondary metabolism, metabolism of primary metabolic sugars derivatives, biosynthesis of glycosides, biosynthesis of secondary products derived from primary amino acids, biosynthesis of amines.

[0166] Energy: glycolysis and gluconeogenesis, pentose-phosphate pathway, tricarboxylic-acid pathway, electron transport and membrane-associated energy conservation, accessory proteins of electron transport and membrane-associated energy conservation, other electron transport and membrane-associated energy conservation proteins, respiration, fermentation, metabolism of energy reserves (glycogen, trehalose), glyoxylate cycle, oxidation of fatty acids, other energy generation activities.

[0167] Cell Growth, Cell Division and DNA Synthesis: cell growth, budding, cell polarity and filament formation, pheromone response, mating-type determination, sex-specific proteins, sporulation and germination, meiosis, DNA synthesis and replication, recombination and DNA repair, cell cycle control and mitosis, cell cycle check point proteins, cytokinesis, other cell growth, cell division and DNA synthesis activities.

[0168] Transcription: rRNA transcription, rRNA synthesis, rRNA processing, other rRNA-transcription activities, tRNA transcription, tRNA synthesis, tRNA processing, tRNA modification, other tRNA-transcription activities, mRNA transcription, mRNA synthesis, general transcription activities, transcriptional control, chromatin modification, mRNA processing (splicing), mRNA processing (5′-, 3′-end processing, mRNA degradation), 3′-end processing, mRNA degradation, other mRNA-transcription activities, RNA transport, other transcription activities.

[0169] Protein Synthesis: ribosomal proteins, translation, translational control, tRNA-synthetases, other protein-synthesis activities.

[0170] Protein Destination: protein folding and stabilization, protein targeting, sorting and translocation, protein modification, modification with fatty acids (e.g. myristylation, palmitylation, farnesylation), modification by phosphorylation, dephosphorylation, modification by acetylation, other protein modifications, assembly of protein complexes, proteolysis, cytoplasmic and nuclear degradation, lysosomal and vacuolar degradation, other proteolytic degradation, other proteolytic proteins, other protein-destination activities.

[0171] Transport Facilitation: channels/pores, ion channels, ion transporters, metal ion transporters (Cu, Fe, etc.), other cation transporters (Na, K, Ca, NH₄, etc.), anion transporters (Cl, SO₄, PO₄, etc.), C-compound and carbohydrate transporters, other C-compound transporters, amino-acid transporters, peptide-transporters, lipid transporters, purine and pyrimidine transporters, allantoin and allantoate transporters, transport ATPases, ABC transporters, drug transporters, other transport facilitators

[0172] Cellular Transport and Transport Mechanisms: nuclear transport, mitochondrial transport, vesicular transport (Golgi network, etc.), peroxisomal transport, vacuolar transport, extracellular transport (secretion), cellular import, cytoskeleton-dependent transport, transport mechanism, other transport mechanisms, other intracellular-transport activities.

[0173] Cellular Biogenesis: biogenesis of cell wall (cell envelope), biogenesis of plasma membrane, biogenesis of cytoskeleton, biogenesis of endoplasmatic reticulum, biogenesis of Golgi, biogenesis of intracellular transport vesicles, nuclear biogenesis, biogenesis of chromosome structure, mitochondrial biogenesis, peroxisomal biogenesis, endosomal biogenesis, vacuolar and lysosomal biogenesis, other cellular biogenesis activities.

[0174] Cellular Communication/signal Transduction: intracellular communication, unspecified signal transduction, second messenger formation, regulation of G-protein activity, key kinases, other unspecified signal transduction activities, morphogenesis, G-proteins, regulation of G-protein activity, key kinases, other morphogenetic activities, osmosensing, receptor proteins, mediator proteins, key kinases, key phosphatases, other osmosensing activities, nutritional response pathway, receptor proteins, second messenger formation, G-proteins, regulation of G-protein activity, key kinases, key phosphatases, other nutritional-response activities, pheromone response generation, receptor proteins, G-proteins, regulation of G-protein activity, key kinases, key phosphatases, other pheromone response activities, other signal-transduction activities.

[0175] Cell Rescue, Defense, Cell Death and Ageing: stress response, DNA repair, other DNA repair, detoxificaton, detoxification involving cytochrome P450, other detoxification, cell death, ageing, degradation of exogenous polynucleotides, other cell rescue activities.

[0176] Ionic Homeostasis: homeostasis of cations, homeostasis of metal ions, homeostasis of protons, homeostasis of other cations, homeostasis of anions, homeostasis of sulfates, homeostasis of phosphate, homeostasis of chloride, homeostasis of other anions.

[0177] Cellular Organization (proteins are localized to the corresponding organelle): organization of cell wall, organization of plasma membrane, organization of cytoplasm, organization of cytoskeleton, organization of centrosome, organization of endoplasmatic reticulum, organization of Golgi, organization of intracellular transport vesicles, nuclear organization, organization of chromosome structure, mitochondrial organization, peroxisomal organization, endosomal organization, vacuolar and lysosomal organization, inner membrane organization, extracellular/secretion proteins.

[0178] Since methods for studying the above-listed functions are well known in the art, the predicted biological function of each of the gene products can be readily verified by one of ordinary skill in the art using reagents and cells described herein.

[0179] In another embodiment of the invention, the use of target gene products that are RNA or proteins of Saccharomyces cerevisiae are provided.

[0180] Peptides and polypeptides corresponding to one or more domains of the target gene products (e.g., signal sequence, TM, ECD, CD, or ligand-binding domains), truncated or deleted target gene products (e.g., polypeptides in which one or more domains of a target gene product are deleted) and fusion target gene proteins (e.g., proteins in which a full length or truncated or deleted target gene product, or a peptide or polypeptide corresponding to one or more domains of a target gene product is fused to an unrelated protein) are also within the scope of the present invention. Such peptides and polypeptides (also referred to as chimeric protein or polypeptides) can be readily designed by those skilled in the art on the basis of the target gene nucleotide and amino acid sequences listed in Table II. Exemplary fusion proteins can include, but are not limited to, epitope tag-fusion proteins which facilitates isolation of the target gene product by affinity chromatography using reagents that binds the epitope. Other exemplary fusion proteins include fusions to any amino acid sequence that allows, e.g., the fusion protein to be anchored to a cell membrane, thereby allowing target gene polypeptides to be exhibited on a cell surface; or fusions to an enzyme (e.g., β-galactosidase encoded by the LAC4 gene of Kluyveronmyces lactis (Leuker et al., 1994, Mol. Gen. Genet., 245:212-217)), to a fluorescent protein (e.g., from Renilla reniformis (Srikantha et al., 1996, J. Bacteriol. 178:121-129), or to a luminescent protein which can provide a marker function. Accordingly, the invention provides a fusion protein comprising a fragment of a first polypeptide fused to a second polypeptide, said fragment of the first polypeptide consisting of at least 6 consecutive residues of an amino acid sequence selected from one of SEQ ID NO: 7001 through to 7310.

[0181] Other modifications of the target gene product coding sequences described above can be made to generate polypeptides that are better suited, e.g., for expression, for scale up, etc. in a chosen host cell. For example, cysteine residues can be deleted or substituted with another amino acid in order to eliminate disulfide bridges.

[0182] The target gene products of the invention preferably comprise at least as many contiguous amino acid residues as are necessary to represent an epitope fragment (that is, for the gene products to be recognized by an antibody directed to the target gene product). For example, such protein fragments or peptides can comprise at least about 8 contiguous amino acid residues from a full length differentially expressed or pathway gene product. In alternative embodiments, the protein fragments and peptides of the invention can comprise about 6, 10, 20, 30, 40, 50, 60, 70, 80, 90, 100, 150, 200, 250, 300, 350, 400, 450 or more contiguous amino acid residues of a target gene product.

[0183] The target gene products used and encompassed in the methods and compositions of the present invention also encompass amino acid sequences encoded by one or more of the above-described target gene sequences of the invention wherein domains often encoded by one or more exons of those sequences, or fragments thereof, have been deleted. The target gene products of the invention can still further comprise post translational modifications, including, but not limited to, glycosylations, acetylations and myristylations.

[0184] The target gene products of the invention can be readily produced, e.g., by synthetic techniques or by methods of recombinant DNA technology using techniques that are well known in the art. Thus, methods for preparing the target gene products of the invention are discussed herein. First, the polypeptides and peptides of the invention can be synthesized or prepared by techniques well known in the art. See, for example, Creighton, 1983, Proteins: Structures and Molecular Principles, W. H. Freeman and Co., N.Y., which is incorporated herein by reference in its entirety. Peptides can, for example, be synthesized on a solid support or in solution.

[0185] Alternatively, recombinant DNA methods which are well known to those skilled in the art can be used to construct expression vectors containing target gene protein coding sequences such as those set forth in SEQ ID NO: 6001 through to 6310, and appropriate transcriptional/translational control signals. These methods include, for example, in vitro recombinant DNA techniques, synthetic techniques and in vivo recombination/genetic recombination. See, for example, the techniques described in Sambrook et al., 1989, Molecular Cloning: A Laboratory Manual, Cold Spring Harbor Press, Cold Spring Harbor, N.Y., Pla et al., Yeast 12:1677-1702 (1996), which are incorporated by reference herein in their entireties, and Ausubel, 1989, supra. Alternatively, RNA capable of encoding target gene protein sequences can be chemically synthesized using, for example, synthesizers. See, for example, the techniques described in Oligonucleotide Synthesis, 1984, Gait, M. J. ed., IRL Press, Oxford, which is incorporated by reference herein in its entirety.

[0186] A variety of host-expression vector systems can be utilized to express the target gene coding sequences of the invention. Such host-expression systems represent vehicles by which the coding sequences of interest can be produced and subsequently purified, but also represent cells which can, when transformed or transfected with the appropriate nucleotide coding sequences, exhibit the target gene protein of the invention in situ. These include but are not limited to microorganisms such as bacteria (e.g., E. coli, B. subtilis) transformed with recombinant bacteriophage DNA, plasmid DNA or cosmid DNA expression vectors containing target gene protein coding sequences; yeast (e.g., Saccharomyces, Schizosaccarhomyces, Neurospora, Aspergillus, Candida, Pichia) transformed with recombinant yeast expression vectors containing the target gene protein coding sequences; insect cell systems infected with recombinant virus expression vectors (e.g., baculovirus) containing the target gene protein coding sequences; plant cell systems infected with recombinant virus expression vectors (e.g., cauliflower mosaic virus, CaMV; tobacco mosaic virus, TMV) or transformed with recombinant plasmid expression vectors (e.g., Ti plasmid) containing target gene protein coding sequences; or mammalian cell systems (e.g. COS, CHO, BHK, 293, 3T3) harboring recombinant expression constructs containing promoters derived from the genome of mammalian cells (e.g., metallothionein promoter) or from mammalian viruses (e.g., the adenovirus late promoter; the vaccinia virus 7.5K promoter). If necessary, the nucleotide sequences of coding regions may be modified according to the codon usage of the host such that the translated product has the correct amino acid sequence.

[0187] In bacterial systems, a number of expression vectors can be advantageously selected depending upon the use intended for the target gene protein being expressed. For example, when a large quantity of such a protein is to be produced, for the generation of antibodies or to screen peptide libraries, for example, vectors which direct the expression of high levels of fusion protein products that are readily purified can be desirable. Such vectors include, but are not limited, to the E. coli expression vector pUR278 (Ruther et al., 1983, EMBO J. 2:1791), in which the target gene protein coding sequence can be ligated individually into the vector in frame with the lacZ coding region so that a fusion protein is produced; pIN vectors (Inouye & Inouye, 1985, Nucleic Acids Res. 13:3101-3109; Van Heeke & Schuster, 1989, J. Biol. Chem. 264:5503-5509); and the like. pGEX vectors can also be used to express foreign polypeptides as fusion proteins with glutathione S-transferase (GST). In general, such fusion proteins are soluble and can easily be purified from lysed cells by adsorption to glutathione-agarose beads followed by elution in the presence of free glutathione. The pGEX vectors are designed to include thrombin or factor Xa protease cleavage sites so that the cloned target gene protein can be released from the GST moiety.

[0188] When a target gene is to be expressed in mammalian host cells, a number of viral-based expression systems can be utilized. In cases where an adenovirus is used as an expression vector, the target gene coding sequence of interest can be ligated to an adenovirus transcription/translation control complex, e.g., the late promoter and tripartite leader sequence. This chimeric gene can then be inserted in the adenovirus genome by in vitro or in vivo recombination. Insertion in a non-essential region of the viral genome (e.g., region E1 or E3) will result in a recombinant virus that is viable and capable of expressing target gene protein in infected hosts, (e.g., See Logan & Shenk, 1984, Proc. Natl. Acad. Sci. USA 81:3655-3659). Specific initiation signals can also be required for efficient translation of inserted target gene coding sequences. These signals include the ATG initiation codon and adjacent sequences. In cases where an entire target gene, including its own initiation codon and adjacent sequences, is inserted into the appropriate expression vector, no additional translational control signals can be needed. However, in cases where only a portion of the target gene coding sequence is inserted, exogenous translational control signals, including, perhaps, the ATG initiation codon, must be provided. Furthermore, the initiation codon must be in phase with the reading frame of the desired coding sequence to ensure translation of the entire insert. These exogenous translational control signals and initiation codons can be of a variety of origins, both natural and synthetic. The efficiency of expression can be enhanced by the inclusion of appropriate transcription enhancer elements, transcription terminators, etc. (see Bittner et al., 1987, Methods in Enzymol. 153:516-544).

[0189] In addition, a host cell strain can be chosen which modulates the expression of the inserted sequences, or modifies and processes the gene product in the specific fashion desired. Such modifications (e.g., glycosylation) and processing (e.g., cleavage) of protein products can be important for the function of the protein. Different host cells have characteristic and specific mechanisms for the post-translational processing and modification of proteins. Appropriate cell lines or host systems can be chosen to ensure the correct modification and processing of the foreign protein expressed. To this end, eukaryotic host cells which possess the cellular machinery for proper processing of the primary transcript, glycosylation, and phosphorylation of the gene product can be used.

[0190] For long-term, high-yield production of recombinant proteins, stable expression is preferred. For example, cell lines which stably express the target gene protein can be engineered. Host cells can be transformed with DNA controlled by appropriate expression control elements (e.g., promoter, enhancer, sequences, transcription terminators, polyadenylation sites, etc.), and a selectable marker. Following the introduction of the foreign DNA, engineered cells can be allowed to grow for 1-2 days in an enriched media, and then are switched to a selective media. The selectable marker in the recombinant plasmid confers resistance to the selection and allows cells to stably integrate the plasmid into their chromosomes and grow to form foci which in turn can be cloned and expanded into cell lines. This method can advantageously be used to engineer cell lines which express the target gene protein. Such engineered cell lines can be particularly useful in screening and evaluation of compounds that affect the endogenous activity of the target gene protein.

[0191] A number of selection systems can be used, including but not limited to the herpes simplex virus thymidine kinase (Wigler et al., 1977, Cell 11:223), hypoxanthine-guanine phosphoribosyltransferase (Szybalska & Szybalski, 1962, Proc. Natl. Acad. Sci. USA 48:2026), and adenine phosphoribosyltransferase (Lowy et al., 1980, Cell 22:817) genes can be employed in tk⁻, hgprt⁻ or aprt⁻ cells, respectively. Also, antimetabolite resistance can be used as the basis of selection for dhfr, which confers resistance to methotrexate (Wigler et al., 1980, Proc. Natl. Acad. Sci. USA 77:3567; O'Hare et al., 1981, Proc. Natl. Acad. Sci. USA 78:1527); gpt, which confers resistance to mycophenolic acid (Mulligan & Berg, 1981, Proc. Natl. Acad. Sci. USA 78:2072); neo, which confers resistance to the aminoglycoside G-418 (Colberre-Garapin et al., 1981, J. Mol. Biol. 150:1); and hygro, which confers resistance to hygromycin (Santerre et al., 1984, Gene 30:147) genes.

[0192] Alternatively, any fusion protein may be readily purified by utilizing an antibody specific for the fusion protein being expressed. For example, a system described by Janknecht et al. allows for the ready purification of non-denatured fusion proteins expressed in human cells lines (Janknecht et al., 1991, Proc. Natl. Acad. Sci. USA 88: 8972-8976). In this system, the gene of interest is subcloned into a vaccinia recombination plasmid such that the gene's open reading frame is translationally fused to an amino-terminal tag consisting of six histidine residues. Extracts from cells infected with recombinant vaccinia virus are loaded onto Ni²⁺ nitriloacetic acid-agarose columns and histidine-tagged proteins are selectively eluted with imidazole-containing buffers. Fusions at the carboxy terminal of the target gene product are also contemplated.

[0193] When used as a component in assay systems such as those described herein, the target gene protein can be labeled, either directly or indirectly, to facilitate detection of a complex formed between the target gene protein and a test substance. Any of a variety of suitable labeling systems can be used including but not limited to radioisotopes such as ¹²⁵I; enzyme labeling systems that generate a detectable colorimetric signal or light when exposed to substrate; and fluorescent labels.

[0194] Indirect labeling involves the use of a protein, such as a labeled antibody, which specifically binds to either a target gene product. Such antibodies include but are not limited to polyclonal antibodies, monoclonal antibodies (mAbs), human, humanized or chimeric antibodies, single chain antibodies, Fab fragments, F(ab′)₂ fragments, fragments produced by a Fab expression library, anti-idiotypic (anti-Id) antibodies, and epitope-binding fragments of any of the above.

[0195] Following expression of the target gene protein encoded by the identified target nucleotide sequence, the protein is purified. Protein purification techniques are well known in the art. Proteins encoded and expressed from identified exogenous nucleotide sequences can be partially purified using precipitation techniques, such as precipitation with polyethylene glycol. Alternatively, epitope tagging of the protein can be used to allow simple one step purification of the protein. In addition, chromatographic methods such as ion-exchange chromatography, gel filtration, use of hydroxyapaptite columns, immobilized reactive dyes, chromatofocusing, and use of high-performance liquid chromatography, may also be used to purify the protein. Electrophoretic methods such as one-dimensional gel electrophoresis, high-resolution two-dimensional polyacrylamide electrophoresis, isoelectric focusing, and others are contemplated as purification methods. Also, affinity chromatographic methods, comprising solid phase bound-antibody, ligand presenting columns and other affinity chromatographic matrices are contemplated as purification methods in the present invention.

[0196] In addition, the purified target gene products, fragments thereof, or derivatives thereof may be administered to an individual in a pharmaceutically acceptable carrier to induce an immune response against the protein or polypeptide. Preferably, the immune response is a protective immune response which protects the individual. Methods for determining appropriate dosages of the protein (including use of adjuvants) and pharmaceutically acceptable carriers are familiar to those skilled in the art.

### 5.4.4 Antibodies Specific for Target Gene Products

[0197] Described herein are methods for the production of antibodies capable of specifically recognizing epitopes of one or more of the target gene products described above. Such antibodies can include, but are not limited to, polyclonal antibodies, monoclonal antibodies (mAbs), human, humanized or chimeric antibodies, single chain antibodies, Fab fragments, F(ab′)₂ fragments, fragments produced by a Fab expression library, anti-idiotypic (anti-Id) antibodies, and epitope-binding fragments of any of the above.

[0198] For the production of antibodies to a target gene or gene product, various host animals can be immunized by injection with a target gene protein, or a portion thereof. Such host animals can include but are not limited to rabbits, mice, and rats, to name but a few. Various adjuvants can be used to increase the immunological response, depending on the host species, including but not limited to Freund's (complete and incomplete), mineral gels such as aluminum hydroxide, surface active substances such as lysolecithin, pluronic polyols, polyanions, peptides, oil emulsions, keyhole limpet hemocyanin, dinitrophenol, and potentially useful human adjuvants such as BCG (bacille Calmette-Guerin) and Corynebacterium parvum. Accordingly, the invention provides a method of eliciting an immune response in an animal, comprising introducing into the animal an immunogenic composition comprising an isolated polypeptide, the amino acid sequence of which comprises at least 6 or at least 8 consecutive residues of one of SEQ ID NO: 7001 through to 7310.

[0199] Polyclonal antibodies are heterogeneous populations of antibody molecules derived from the sera of animals immunized with an antigen, such as target gene product, or an antigenic functional derivative thereof. For the production of polyclonal antibodies, host animals such as those described above, can be immunized by injection with differentially expressed or pathway gene product supplemented with adjuvants as also described above. The antibody titer in the immunized animal can be monitored over time by standard techniques, such as with an enzyme linked immunosorbent assay (ELISA) using immobilized polypeptide. If desired, the antibody molecules can be isolated from the animal (e.g., from the blood) and further purified by well-known techniques, such as protein A chromatography to obtain the IgG fraction.

[0200] Monoclonal antibodies, which are homogeneous populations of antibodies to a particular antigen, can be obtained by any technique which provides for the production of antibody molecules by continuous cell lines in culture. These include, but are not limited to the hybridoma technique of Kohler and Milstein, (1975, Nature 256:495-497; and U.S. Pat. No. 4,376,110), the human B-cell hybridoma technique (Kosbor et al., 1983, Immunology Today 4:72; Cole et al., 1983, Proc. Natl. Acad. Sci. USA 80:2026-2030), and the EBV-hybridoma technique (Cole et al., 1985, Monoclonal Antibodies And Cancer Therapy, Alan R. Liss, Inc., pp. 77-96). Such antibodies can be of any immunoglobulin class including IgG, IgM, IgE, IgA, IgD and any subclass thereof. The hybridoma producing the mAb of this invention can be cultivated in vitro or in vivo. Production of high titers of mAbs in vivo makes this the presently preferred method of production.

[0201] Alternative to preparing monoclonal antibody-secreting hybridomas, a monoclonal antibody directed against a polypeptide of the invention can be identified and isolated by screening a recombinant combinatorial immunoglobulin library (e.g., an antibody phage display library) with the polypeptide of interest. Kits for generating and screening phage display libraries are commercially available (e.g., the Pharmacia Recombinant Phage Antibody System, Catalog No. 27-9400-01; and the Stratagene SurfZAP™ Phage Display Kit, Catalog No. 240612). Additionally, examples of methods and reagents particularly amenable for use in generating and screening antibody display library can be found in, for example, U.S. Pat. No. 5,223,409; PCT Publication No. WO 92/18619; PCT Publication No. WO 91/17271; PCT Publication No. WO 92/20791; PCT Publication No. WO 92/15679; PCT Publication No. WO 93/01288; PCT Publication No. WO 92/01047; PCT Publication No. WO 92/09690; PCT Publication No. WO 90/02809; Fuchs et al. (1991) Bio/Technology 9:1370-1372; Hay et al. (1992) Hum. Antibod. Hybridomas 3:81-85; Huse et al. (1989) Science 246:1275-1281; Griffiths et al. (1993) EMBO J. 12:725-734.

[0202] Additionally, recombinant antibodies, such as chimeric and humanized monoclonal antibodies, comprising both human and non-human portions, which can be made using standard recombinant DNA techniques, are within the scope of the invention. A chimeric antibody is a molecule in which different portions are derived from different animal species, such as those having a variable region derived from a murine mAb and a human immunoglobulin constant region. (See, e.g., Cabilly et al., U.S. Pat. No. 4,816,567; and Boss et al., U.S. Pat. No. 4,816,397, which are incorporated herein by reference in their entirety.) Humanized antibodies are antibody molecules from non-human species having one or more complementarily determining regions (CDRs) from the non-human species and a framework region from a human immunoglobulin molecule. (See, e.g., Queen, U.S. Pat. No. 5,585,089, which is incorporated herein by reference in its entirety.) Such chimeric and humanized monoclonal antibodies can be produced by recombinant DNA techniques known in the art, for example using methods described in PCT Publication No. WO 87/02671; European Patent Application 184,187; European Patent Application 171,496; European Patent Application 173,494; PCT Publication No. WO 86/01533; U.S. Pat. No. 4,816,567; European Patent Application 125,023; Better et al. (1988) Science 240:1041-1043; Liu et al. (1987) Proc. Natl. Acad. Sci. USA 84:3439-3443; Liu et al. (1987) J. Immunol. 139:3521-3526; Sun et al. (1987) Proc. Natl. Acad. Sci. USA 84:214-218; Nishimura et al. (1987) Canc. Res. 47:999-1005; Wood et al. (1985) Nature 314:446-449; and Shaw et al. (1988) J. Natl. Cancer Inst. 80:1553-1559); Morrison (1985) Science 229:1202-1207; Oi et al. (1986) Bio/Techniques 4:214; U.S. Pat. No. 5,225,539; Jones et al. (1986) Nature 321:552-525; Verhoeyan et al. (1988) Science 239:1534; and Beidler et al. (1988) J. Immunol. 141:4053-4060.

[0203] Completely human antibodies are particularly desirable for therapeutic treatment of human patients. Such antibodies can be produced using transgenic mice which are incapable of expressing endogenous immunoglobulin heavy and light chains genes, but which can express human heavy and light chain genes. The transgenic mice are immunized in the normal fashion with a selected antigen, e.g., all or a portion of a polypeptide of the invention. Monoclonal antibodies directed against the antigen can be obtained using conventional hybridoma technology. The human immunoglobulin transgenes harbored by the transgenic mice rearrange during B cell differentiation, and subsequently undergo class switching and somatic mutation. Thus, using such a technique, it is possible to produce therapeutically useful IgG, IgA and IgE antibodies. For an overview of this technology for producing human antibodies, see Lonberg and Huszar (1995, Int. Rev. Immunol. 13:65-93). For a detailed discussion of this technology for producing human antibodies and human monoclonal antibodies and protocols for producing such antibodies, see, e.g., U.S. Pat. No. 5,625,126; U.S. Pat. No. 5,633,425; U.S. Pat. No. 5,569,825; U.S. Pat. No. 5,661,016; and U.S. Pat. No. 5,545,806.

[0204] Completely human antibodies which recognize a selected epitope can be generated using a technique referred to as “guided selection.” In this approach a selected non-human monoclonal antibody, e.g., a mouse antibody, is used to guide the selection of a completely human antibody recognizing the same epitope. (Jespers et al. (1994) Bio/technology 12:899-903).

[0205] Antibody fragments which recognize specific epitopes can be generated by known techniques. For example, such fragments include but are not limited to: the F(ab′)₂ fragments which can be produced by pepsin digestion of the antibody molecule and the Fab fragments which can be generated by reducing the disulfide bridges of the F(ab′)₂ fragments. Alternatively, Fab expression libraries can be constructed (Huse et al., 1989, Science_{—}246:1275-1281) to allow rapid and easy identification of monoclonal Fab fragments with the desired specificity.

[0206] Antibodies of the present invention may also be described or specified in terms of their binding affinity to a target gene product. Preferred binding affinities include those with a dissociation constant or Kd less than 5×10⁻⁶ M, 10⁻⁶M, 5×10⁻⁷M, 10⁻⁷M, 5×10⁻⁸ M, 10⁻⁸ M, 5×10⁻⁹M, 10⁻⁹M, 5×10⁻¹⁰ M, 10⁻¹⁰ M, 5×10⁻¹¹ M, 10⁻¹¹ M, 5×10⁻¹²M, 10⁻¹² M, 5×10⁻¹³M, 10⁻¹³M, 5×10⁻¹⁴M, 10⁻¹⁴M, 5×10⁻¹⁵M, or 10^{-‥}M.

[0207] Antibodies directed against a target gene product or fragment thereof can be used to detect the a target gene product in order to evaluate the abundance and pattern of expression of the polypeptide under various environmental conditions, in different morphological forms (mycelium, yeast, spores) and stages of an organism's life cycle. Antibodies directed against a target gene product or fragment thereof can be used diagnostically to monitor levels of a target gene product in the tissue of an infected host as part of a clinical testing procedure, e.g., to, for example, determine the efficacy of a given treatment regimen. Detection can be facilitated by coupling the antibody to a detectable substance. Examples of detectable substances include various enzymes, prosthetic groups, fluorescent materials, luminescent materials, bioluminescent materials, and radioactive materials. Examples of suitable enzymes include horseradish peroxidase, alkaline phosphatase, beta-galactosidase, or acetylcholinesterase; examples of suitable prosthetic group complexes include streptavidin/biotin and avidin/biotin; examples of suitable fluorescent materials include umbelliferone, fluorescein, fluorescein isothiocyanate, rhodamine, dichlorotriazinylamine fluorescein, dansyl chloride or phycoerythrin; an example of a luminescent material includes luminol; examples of bioluminescent materials include luciferase, luciferin, and aequorin, and examples of suitable radioactive material include 125I, 131I, 35S or 3H.

[0208] Further, antibodies directed against a target gene product or fragment thereof can be used therapeutically to treat an infectious disease by preventing infection, and/or inhibiting growth of the pathogen. Antibodies can also be used to modify a biological activity of a target gene product. Antibodies to gene products related to virulence or pathogenicity can also be used to prevent infection and alleviate one or more symptoms associated with infection by the organism. To facilitate or enhance its therapeutic effect, an antibody (or fragment thereof) may be conjugated to a therapeutic moiety such as a toxin or fungicidal agent. Techniques for conjugating a therapeutic moiety to antibodies are well known, see, e.g., Thorpe et al., “The Preparation And Cytotoxic Properties Of Antibody-Toxin Conjugates”, Immunol. Rev., 62:119-58 (1982).

[0209] An antibody with or without a therapeutic moiety conjugated to it can be used as a therapeutic that is administered alone or in combination with chemotherapeutic agents.

### 5.4.5 Antisense Molecules

[0210] The use of antisense molecules as inhibitors of gene expression may be a specific, genetically based therapeutic approach (for a review, see Stein, in Ch. 69, Section 5 “Cancer: Principle and Practice of Oncology”, 4th ed., ed. by DeVita et al., J. B. Lippincott, Philadelphia 1993). The present invention provides the therapeutic or prophylactic use of nucleic acids of at least six nucleotides that are antisense to a target essential or virulence gene or a portion thereof. An “antisense” target nucleic acid as used herein refers to a nucleic acid capable of hybridizing to a portion of a target gene RNA (preferably mRNA) by virtue of some sequence complementarity. The invention further provides pharmaceutical compositions comprising an effective amount of the antisense nucleic acids of the invention in a pharmaceutically acceptable carrier, as described infra.

[0211] In another embodiment, the invention is directed to methods for inhibiting the expression of a target gene in an organism of interest, such as C. albicans in vitro or in vivo comprising providing the cell with an effective amount of a composition comprising an antisense nucleic acid of the invention. Multiple antisense polynucleotides hybridizable to different target genes may be used in combinations, sequentially or simultaneously.

[0212] In another embodiment, the present invention is directed toward methods for modulating expression of an essential gene which has been identified by the methods described supra, in which an antisense RNA molecule, which inhibits translation of mRNA transcribed from an essential gene, is expressed from a regulatable promoter. In one aspect of this embodiment, the antisense RNA molecule is expressed in a GRACE strain of Candida albicans or another GRACE strain constructed from another diploid pathogenic organism. In other aspects of this embodiment, the antisense RNA molecule is expressed in a wild-type or other non-GRACE strain of Candida albicans or another diploid pathogenic organism, including animal fugal pathogens such as Aspergillus fumigatus, Aspergillus niger, Aspergillus flavis, Candida tropicalis, Candida parapsilopsis, Candida krusei, Cryptococcus neoformans, Coccidioides immitis, Exophalia dermatiditis, Fusarium oxysporum, Histoplasma capsulatum, Phneumocystis carinii, Trichosporon beigelii, Rhizopus arrhizus, Mucor rouxii, Rhizomucor pusillus, or Absidia corymbigera, or the plant fungal pathogens, such as Botrytis cinerea, Erysiphe graminis, Magnaporthe grisea, Puccinia recodita, Septoria triticii, Tilletia controversa, Ustilago maydiss, or any species falling within the genera of any of the above species.

[0213] The nucleic acid molecule comprising an antisense nucleotide sequence of the invention may be complementary to a coding and/or noncoding region of a target gene mRNA. The antisense molecules will bind to the complementary target gene mRNA transcripts and reduce or prevent translation. Absolute complementarity, although preferred, is not required. A sequence “complementary” to a portion of an RNA, as referred to herein, means a sequence having sufficient complementarity to be able to hybridize with the RNA, forming a stable duplex; in the case of double-stranded antisense nucleic acids, a single strand of the duplex DNA may thus be tested, or triplex formation may be assayed. The ability to hybridize will depend on both the degree of complementarity and the length of the antisense nucleic acid. One skilled in the art can ascertain a tolerable degree of mismatch by use of standard procedures to determine the melting point of the hybridized complex.

[0214] Nucleic acid molecules that are complementary to the 5′ end of the message, e.g., the 5′ untranslated sequence up to and including the AUG initiation codon, should work most efficiently at inhibiting translation. However, sequences complementary to the 3′ untranslated sequences of mRNAs have recently been shown to be effective at inhibiting translation of mRNAs as well. See generally, Wagner, R., 1994, Nature 372:333-335.

[0215] Nucleic acid molecules comprising nucleotide sequences complementary to the 5′ untranslated region of the mRNA can include the complement of the AUG start codon. Antisense nucleic acid molecules complementary to mRNA coding regions are less efficient inhibitors of translation but could be used in accordance with the invention. Whether designed to hybridize to the 5′-, 3′- or coding region of target gene mRNA, antisense nucleic acids should be at least six nucleotides in length, and are preferably oligonucleotides ranging from 6 to about 50 nucleotides in length. In specific aspects, the oligonucleotide is at least 10 nucleotides, at least 17 nucleotides, at least 25 nucleotides, at least 50 nucleotides, or at least 200 nucleotides.

[0216] Regardless of the choice of target gene sequence, it is preferred that in vitro studies are first performed to quantitate the ability of the antisense molecule to inhibit gene expression. It is preferred that these studies utilize controls that distinguish between antisense gene inhibition and nonspecific biological effects of oligonucleotides. It is also preferred that these studies compare levels of the target RNA or protein with that of an internal control RNA or protein. Additionally, it is envisioned that results obtained using the antisense oligonucleotide are compared with those obtained using a control oligonucleotide. It is preferred that the control oligonucleotide is of approximately the same length as the test oligonucleotide and that the nucleotide sequence of the oligonucleotide differs from the antisense sequence no more than is necessary to prevent specific hybridization to the target sequence.

[0217] The antisense molecule can be DNA or RNA or chimeric mixtures or derivatives or modified versions thereof, single-stranded or double-stranded. The antisense molecule can be modified at the base moiety, sugar moiety, or phosphate backbone, for example, to improve stability of the molecule, hybridization, etc. The antisense molecule may include other appended groups such as peptides (e.g., for targeting cell receptors in vivo), hybridization-triggered cleavage agents. (See, e.g., Krol et al., 1988, BioTechniques 6:958-976) or intercalating agents. (See, e.g., Zon, 1988, Pharm. Res. 5:539-549). To this end, the antisense molecule may be conjugated to another molecule, e.g., a peptide, hybridization triggered cross-linking agent, transport agent, hybridization-triggered cleavage agent, etc.

[0218] The antisense molecule may comprise at least one modified base moiety which is selected from the group including but not limited to 5-fluorouracil, 5-bromouracil, 5-chlorouracil, 5-iodouracil, hypoxanthine, xanthine, 4-acetylcytosine, 5-(carboxyhydroxylmethyl) uracil, 5-carboxymethylaminomethyl-2-thiouridine, 5-carboxymethylaminomethyluracil, dihydrouracil, beta-D-galactosylqueosine, inosine, N6-isopentenyladenine, 1-methylguanine, 1-methylinosine, 2,2-dimethylguanine, 2-methyladenine, 2-methylguanine, 3-methylcytosine, 5-methylcytosine, N6-adenine, 7-methylguanine, 5-methylaminomethyluracil, 5-methoxyaminomethyl-2-thiouracil, beta-D-mannosylqueosine, 5′-methoxycarboxymethyluracil, 5-methoxyuracil, 2-methylthio-N-6-isopentenyladenine, uracil-5-oxyacetic acid (v), wybutoxosine, pseudouracil, queosine, 2-thiocytosine, 5-methyl-2-thiouracil, 2-thiouracil, 4-thiouracil, 5-methyluracil, uracil-5-oxyacetic acid methylester, uracil-5-oxyacetic acid (v), 5-methyl-2-thiouracil, 3-(3-amino-3-N-2-carboxypropyl) uracil, (acp3)w, and 2,6-diaminopurine.

[0219] The antisense molecule may also comprise at least one modified sugar moiety selected from the group including but not limited to arabinose, 2-fluoroarabinose, xylulose, and hexose.

[0220] In yet another embodiment, the antisense molecule comprises at least one modified phosphate backbone selected from the group consisting of a phosphorothioate, a phosphorodithioate, a phosphoramidothioate, a phosphoramidate, a phosphordiamidate, a methylphosphonate, an alkyl phosphotriester, and a formacetal or analog thereof.

[0221] In yet another embodiment, the antisense molecule is an α-anomeric oligonucleotide. An α-anomeric oligonucleotide forms specific double-stranded hybrids with complementary RNA in which, contrary to the usual β-units, the strands run parallel to each other (Gautier et al., 1987, Nucl. Acids Res. 15:6625-6641). The oligonucleotide is a 2′-β-methylribonucleotide (Inoue et al., 1987, Nucl. Acids Res. 15:6131-6148), or a chimeric RNA-DNA analogue (Inoue et al., 1987, FEBS Lett. 215:327-330).

[0222] Antisense molecules of the invention may be synthesized by standard methods known in the art, e.g. by use of an automated DNA synthesizer (such as are commercially available from Biosearch, Applied Biosystems, etc.). As examples, phosphorothioate oligonucleotides may be synthesized by the method of Stein et al. (1988, Nucl. Acids Res. 16:3209), methylphosphonate oligonucleotides can be prepared by use of controlled pore glass polymer supports (Sarin et al., 1988, Proc. Natl. Acad. Sci. U.S.A. 85:7448-7451), etc.

[0223] While antisense nucleotides complementary to the coding region of a target gene could be used, those complementary to the transcribed untranslated region are also preferred.

[0224] Pharmaceutical compositions of the invention comprising an effective amount of an antisense nucleic acid in a pharmaceutically acceptable carrier, can be administered to a subject infected with the pathogen of interest.

[0225] The amount of antisense nucleic acid which will be effective in the treatment of a particular disease caused by the pathogen will depend on the site of the infection or condition, and can be determined by standard techniques. Where possible, it is desirable to determine the antisense cytotoxicity of the pathogen to be treated in vitro, and then in useful animal model systems prior to testing and use in humans.

[0226] A number of methods have been developed for delivering antisense DNA or RNA to cells; e.g., antisense molecules can be injected directly into the tissue site in which the pathogens are residing, or modified antisense molecules, designed to target the desired cells (e.g., antisense molecule linked to peptides or antibodies that specifically bind receptors or antigens expressed on the pathogen's cell surface) can be administered systemically. Antisense molecules can be delivered to the desired cell population via a delivery complex. In a specific embodiment, pharmaceutical compositions comprising antisense nucleic acids of the target genes are administered via biopolymers (e.g., poly-β-1→4-N-acetylglucosamine polysaccharide), liposomes, microparticles, or microcapsules. In various embodiments of the invention, it may be useful to use such compositions to achieve sustained release of the antisense nucleic acids. In a specific embodiment, it may be desirable to utilize liposomes targeted via antibodies to specific identifiable pathogen antigens (Leonetti et al., 1990, Proc. Natl. Acad. Sci. U.S.A. 87:2448-2451; Renneisen et al., 1990, J. Biol. Chem. 265:16337-16342).

### 5.4.6 Ribozyme Molecules

[0227] Ribozymes are enzymatic RNA molecules capable of catalyzing the specific cleavage of RNA (For a review see, for example Rossi, J., 1994, Current Biology 4:469-471). The mechanism of ribozyme action involves sequence specific hybridization of the ribozyme molecule to complementary target RNA, followed by a endonucleolytic cleavage. The composition of ribozyme molecules must include one or more sequences complementary to the target gene mRNA, and must include the well known catalytic sequence responsible for mRNA cleavage. For this sequence, see U.S. Pat. No. 5,093,246, which is incorporated by reference herein in its entirety. As such, within the scope of the invention are engineered hammerhead motif ribozyme molecules that specifically and efficiently catalyze endonucleolytic cleavage of RNA sequences encoding target gene proteins.

[0228] Ribozyme molecules designed to catalytically cleave specific target gene mRNA transcripts can also be used to prevent translation of target gene mRNA and expression of target genes. While ribozymes that cleave mRNA at site specific recognition sequences can be used to destroy target gene mRNAs, the use of hammerhead ribozymes is preferred. Hammerhead ribozymes cleave mRNAs at locations dictated by flanking regions that form complementary base pairs with the target gene mRNA. The sole requirement is that the target mRNA have the following sequence of two bases: 5′-UG-3′. The construction and production of hammerhead ribozymes is well known in the art and is described more fully in Haseloff and Gerlach, 1988, Nature, 334:585-591. Preferably the ribozyme is engineered so that the cleavage recognition site is located near the 5′ end of the target gene mRNA; i.e., to increase efficiency and minimize the intracellular accumulation of non-functional mRNA transcripts.

[0229] The ribozymes of the present invention also include RNA endoribonucleases (hereinafter “Cech-type ribozymes”) such as the one which occurs naturally in Tetrahymena thermophila (known as the IVS, or L-19 IVS RNA) and which has been extensively described by Thomas Cech and collaborators (Zaug, et al., 1984, Science, 224:574-578; Zaug and Cech, 1986, Science, 231:470-475; Zaug, et al., 1986, Nature, 324:429-433; published International patent application No. WO 88/04300 by University Patents Inc.; Been and Cech, 1986, Cell, 47:207-216). The Cech-type ribozymes have an eight base pair active site which hybridizes to a target RNA sequence whereafter cleavage of the target RNA takes place. The invention encompasses those Cech-type ribozymes which target eight base-pair active site sequences that are present in a target gene.

[0230] As in the antisense approach, the ribozymes can be composed of modified oligonucleotides (e.g. for improved stability, targeting, etc.) and should be delivered to cells which express the target gene in vivo. Because ribozymes unlike antisense molecules, are catalytic, a lower intracellular concentration is required for efficiency. Multiple ribozyme molecules directed against different target genes can also be used in combinations, sequentially or simultaneously.

[0231] Anti-sense RNA and DNA, ribozyme, and triple helix molecules of the invention can be prepared by any method known in the art for the synthesis of DNA and RNA molecules. These include techniques for chemically synthesizing oligodeoxyribonucleotides and oligoribonucleotides well known in the art such as for example solid phase phosphoramidite chemical synthesis. Alternatively, RNA molecules can be generated by in vitro and in vivo transcription of DNA sequences encoding the antisense RNA molecule. Such DNA sequences can be incorporated into a wide variety of vectors which incorporate suitable RNA polymerase promoters such as the T7 or SP6 polymerase promoters. Alternatively, antisense cDNA constructs that synthesize antisense RNA constitutively or inducibly, depending on the promoter used, can be introduced stably into cell lines. These nucleic acid constructs can be administered selectively to the desired cell population via a delivery complex.

[0232] Various well-known modifications to the DNA molecules can be introduced as a means of increasing intracellular stability and half-life. Possible modifications include, but are not limited to, the addition of flanking sequences of ribo- or deoxy-nucleotides to the 5′ and/or 3′ ends of the molecule or the use of phosphorothioate or 2′ O-methyl rather than phosphodiesterase linkages within the oligodeoxyribonucleotide backbone.

### 5.5 Screening Assays

[0233] The following assays are designed to identify compounds that bind to target gene products, bind to other cellular proteins that interact with the target gene product, and to compounds that interfere with the interaction of the target gene product with other cellular proteins. Compounds identified via such methods can include compounds which modulate the activity of a polypeptide encoded by a target gene of the invention (that is, increase or decrease its activity, relative to activity observed in the absence of the compound). Alternatively, compounds identified via such methods can include compounds which modulate the expression of the polynucleotide (that is, increase or decrease expression relative to expression levels observed in the absence of the compound), or increase or decrease the stability of the expressed product encoded by that polynucleotide. Compounds, such as compounds identified via the methods of the invention, can be tested using standard assays well known to those of skill in the art for their ability to modulate activity/expression.

[0234] Accordingly, the present invention provides a method for identifying an antimycotic compound comprising screening a plurality of compounds to identify a compound that modulates the activity or level of a gene product, said gene product being encoded by a nucleotide sequence selected from the group consisting of SEQ ID NO: 6001 through to 6310, or a nucleotide sequence that is naturally occurring in Saccharomyces cerevisiae and that is the ortholog of a gene having a nucleotide sequence selected from the group consisting of SEQ ID NO: 6001 through to 6310.

### 5.5.1 In Vitro Screening Assays

[0235] In vitro screening assays are designed to identify compounds capable of binding the target gene products of the invention. Compounds identified in this manner are useful, for example, in modulating the activity of wild type and/or mutant target gene products, are useful in elucidating the biological function of target gene products, are utilized in screens for identifying other compounds that disrupt normal target gene product interactions, or are useful themselves for the disruption of such interactions.

[0236] The principle of the assays used to identify compounds that bind to the target gene product involves preparing a reaction mixture comprising the target gene product and the test compound under conditions and for a time sufficient to allow the two components to interact and bind, thus forming a complex which is removed and/or detected within the reaction mixture. These assays are conducted in a variety of ways. For example, any method that detects an altered physical property (e.g., size, mobility, etc.) of a target gene product of the invention complexed to a test compound from an unbound target gene product of the invention can be used in the methods of the invention, including, but not limited to, electrophoresis, size exclusion chromatography, and mass spectrometry. Other methods to detect binding between polypeptide molecules of the invention and test compounds directly can also be used, including, but not limited to, affinity chromatography, scintillation proximity assay, nuclear magnetic resonance spectroscopy, and fluorescence resonance energy transfer.

[0237] In a first embodiment, electrophoresis is used to identify test compounds capable of binding a polypeptide of the invention. In general, a polypeptide molecule of the invention bound to a test compound is larger than an unbound polypeptide molecule of the invention. Electrophoretic separation based on size allows for determination of such a change in size. Any method of electrophoretic separation, including but not limited to, denaturing and non-denaturing polyacrylamide gel electrophoresis, urea gel electrophoresis, gel filtration, pulsed field gel electrophoresis, two dimensional gel electrophoresis, continuous flow electrophoresis, zone electrophoresis, agarose gel electrophoresis, and capillary electrophoresis can be used. In a preferred embodiment, an automated electrophoretic system comprising a capillary cartridge having a plurality of capillary tubes is used for high-throughput screening of test compounds capable of binding a target gene product of the invention. Such an apparatus for performing automated capillary gel electrophoresis is disclosed in U.S. Pat. Nos. 5,885,430; 5,916,428; 6,027,627; and 6,063,251. In another preferred embodiment, an automated electrophoretic system can comprise a chip-based microfluidic system for high-speed electrophoretic analysis See, for example, U.S. Pat. Nos. 5,699,157.

[0238] In a second embodiment, size exclusion chromatography is used to identify test compounds capable of binding polypeptide molecules of the invention. Size-exclusion chromatography separates molecules based on their size and uses gel-based media comprised of beads with specific size distributions. When applied to a column, this media settles into a tightly packed matrix and forms a complex array of pores. Separation is accomplished by the inclusion or exclusion of molecules by these pores based on molecular size. Small molecules are included into the pores and, consequently, their migration through the matrix is retarded due to the added distance they must travel before elution. Large molecules are excluded from the pores and migrate with the void volume when applied to the matrix. In the present invention, a target gene product of the invention bound to a test compound will be larger, and thus elute faster from the size exclusion column, than an unbound polypeptide molecule.

[0239] In a third embodiment, mass spectrometry is used to identify test compounds capable of binding polypeptides of the invention. An automated method for analyzing mass spectrometer data which can analyze complex mixtures containing many thousands of components and can correct for background noise, multiply charged peaks and atomic isotope peaks is described in U.S. Pat. No. 6,147,344.

[0240] In another embodiment, affinity chromatography is used to identify test compounds capable of binding target gene products of the invention. To accomplish this, a target gene product of the invention is labeled with an affinity tag (e.g., GST, HA, myc, streptavidin, biotin) such that the polypeptide molecule of the invention can attach to a solid support through interaction with the affinity tag and solid support medium. The tagged polypeptide of the invention is contacted with a test compound either while free in solution or while bound to a solid support. The solid support an comprise, but is not limited to, cross-linked agarose beads that are coupled with a ligand for the affinity tag. Alternatively, the solid support may be a glass, silicon, metal, or carbon, plastic (polystyrene, polypropylene) surface with or without a self-assembled monolayer either with a covalently attached ligand for the affinity tag, or with inherent affinity for the tag on the polypeptide molecule of the invention.

[0241] Once the complex between the target gene product of the invention and test compound has reached equilibrium and has been captured, one skilled in the art will appreciate that the retention of bound compounds and removal of unbound compounds is facilitated by washing the solid support with large excesses of binding reaction buffer.

[0242] Furthermore, retention of high affinity compounds and removal of low affinity compounds can be accomplished by a number of means that increase the stringency of washing; these means include, but are not limited to, increasing the number and duration of washes, raising the salt concentration of the wash buffer, addition of detergent or surfactant to the wash buffer, and addition of non-specific competitor to the wash buffer.

[0243] Following the removal of unbound compounds, bound compounds with high affinity for the immobilized polypeptide molecule of the invention can be eluted and analyzed. The elution of test compounds can be accomplished by any means that break the non-covalent interactions between the polypeptide of the invention and test compound. Means for elution include, but are not limited to, changing the pH, changing the salt concentration, the application of organic solvents, and the application of molecules that compete with the bound ligand. Preferably, the means employed for elution will release the compound from the target gene product of invention, but will not effect the interaction between the affinity tag and the solid support, thereby achieving selective elution of test compound.

[0244] In a preferred embodiment, affinity chromatography is used for high through put screening. In this embodiment, the test compound is detectably labeled (e.g., with fluorescent dyes, radioactive isotopes, etc.) and applied to polypeptide molecules of the invention in a spatially addressed fashion (e.g., attached to separate wells of a microplate). Binding between the test compound and the polypeptide molecule of the invention can be determined by the presence of the detectable label on the test compound to quickly identify which wells contain test compounds capable of binding.

[0245] In practice, microtiter plates are conveniently utilized as the solid phase. The anchored component is immobilized by non-covalent or covalent attachments. Non-covalent attachment can be accomplished by simply coating the solid surface with a solution of the protein and drying the coated surface. Alternatively, an immobilized antibody, preferably a monoclonal antibody, specific for the protein to be immobilized is used to anchor the protein to the solid surface. The surfaces are prepared in advance and stored. In order to conduct the assay, the nonimmobilized component is added to the coated surface containing the anchored component. After the reaction is complete, unreacted components are removed (e.g., by washing) under conditions such that any complexes formed will remain immobilized on the solid surface. The detection of complexes anchored on the solid surface is accomplished in a number of ways. Where the previously nonimmobilized component is pre-labeled, the detection of label immobilized on the surface indicates that complexes were formed. Where the previously nonimmobilized component is not pre-labeled, an indirect label is used to detect complexes anchored on the surface; eg., using a labeled antibody specific for the previously nonimmobilized component (the antibody, in turn, is directly labeled or indirectly labeled with a labeled anti-Ig antibody).

[0246] Alternatively, a reaction is conducted in a liquid phase, the reaction products are separated from unreacted components, and complexes are detected; e.g., using an immobilized antibody specific for the target gene product or for the test compound, to anchor complexes formed in solution, and a second labeled antibody, specific for the other component of the complex to allow detection of anchored complexes.

[0247] In yet another embodiment, a scintillation proximity assay (“SPA”) can be used to identify test compounds capable of binding to a target gene product of the invention. In this embodiment either the target gene product of the invention or the test compound must labeled (e.g., with a radioisotope, etc.). The unlabeled entity is attached to a surface impregnated with a scintillant. The labeled entity is then incubated with the attached unlabeled entity under conditions that allow binding. The amount of binding between a target gene product of the invention and test compound is quantitated with a scintillation counter (Cook, 1996, Drug Discov. Today 1:287-294; Mei et al., 1997, Bioorg. Med. Chem. 5:1173-1184; Mei et al., 1998, Biochemistry 37:14204-14212). High throughput SPA screening uses microplates with scintillant either directly incorporated into the plastic (Nakayama et al., 1998, J Biomol. Screening 3:43-48) or coating the plastic. In a preferred embodiment, such microtiter plates are used in methods of the invention comprising (a) labeling of the target gene product of the invention with a radioactive label; (b) contacting the labeled target gene product with a test compound, wherein the test compound is attached to a microtiter well coated with scintillant; and (c) identifying and quantifying the amount of polypeptide of the invention bound to the test compound with SPA.

[0248] In yet another embodiment, nuclear magnetic resonance spectroscopy (“NMR”) is used to identify test compounds capable of binding target gene product of the invention. NMR is used to identify target gene product of the invention that are bound by a test compound by qualitatively determining changes in chemical shift, specifically from distances measured using relaxation effects. NMR-based approaches have been used in the identification of small molecule binders of protein drug targets (Xavier et al., 2000, Trends Biotechnol. 18:349-356). Also applicable is a strategy for lead generation by NMR using a library of small molecules which has been described in Fejzo et al. (1999, Chem. Biol. 6:755-769).

[0249] In yet another embodiment, fluorescence resonance energy transfer (“FRET”) can be used to identify test compounds capable of binding to a target gene product of the invention. In this embodiment, both the target gene product of the invention and the test compound are labeled with a different fluorescent molecule (i.e., flourophore). A characteristic change in fluorescence occurs when two fluorophores with overlapping emission and excitation wavelength bands are held together in close proximity, such as by a binding event. One of the fluorophores used as a label will have overlapping excitation and emission spectra with the other fluorophore used as a label such that one fluorophore (the donor) transfers its emission energy to excite the other fluorophore (the acceptor). The acceptor preferably emits light of a different wavelength upon relaxing to the ground state, or relaxes non-radioactively to quench fluorescence. FRET is very sensitive to the distance between the two fluorophores, and allows measurement of molecular distances less than 10 nm (e.g., U.S. Pat. No. 6,337,183 and Matsumoto et al., 2000, Bioorg. Med. Chem. Lett. 10:1857-1861).

### 5.5.1.1 Assays For Compounds That Affect Target Gene Product Interactions

[0250] The target gene products of the invention interact, in vivo, with one or more cellular or extracellular macromolecules, such as proteins. Such macromolecules include, but are not limited to, nucleic acid molecules and proteins identified via methods such as those described above. For purposes of this discussion, such cellular and extracellular macromolecules are referred to herein as “binding partners.” Compounds that disrupt such interactions can be useful in regulating the activity of the target gene protein, especially mutant target gene proteins. Such compounds include, but are not limited to molecules such as antibodies, peptides, and the like, as described.

[0251] Any method suitable for detecting or measuring protein-macromolecule interactions can be employed for identifying novel target gene product-cellular or extracellular protein interactions as well as compounds that interfere with such interactions. Many of the techniques described in the previous section can be used for this purpose.

[0252] The basic principle of the assay systems used to identify compounds that interfere with the interaction between the target gene product and its cellular or extracellular binding partner or partners involves preparing a reaction mixture containing the target gene product and the binding partner under conditions and for a time sufficient to allow the two to interact and bind, thus forming a complex. In order to test a compound for inhibitory activity, the reaction mixture is prepared in the presence and absence of the test compound. The test compound is initially included in the reaction mixture, or added at a time subsequent to the addition of target gene product and its cellular or extracellular binding partner. Control reaction mixtures are incubated without the test compound. The formation of complexes between the target gene protein and the cellular or extracellular binding partner is then detected. The formation of a complex in the control reaction, but not in the reaction mixture containing the test compound, indicates that the compound interferes with the interaction of the target gene protein and the interactive binding partner. Additionally, complex formation within reaction mixtures containing the test compound and normal target gene protein can also be compared to complex formation within reaction mixtures containing the test compound and a mutant target gene protein. This comparison can be important in those cases wherein it is desirable to identify compounds that disrupt intermolecular interactions involving mutant but not normal target gene proteins.

[0253] The assay for compounds that interfere with the interaction of the target gene products and binding partners is conducted in either a heterogeneous or a homogeneous format. Heterogeneous assays involve anchoring either the target gene product or the binding partner onto a solid phase and detecting complexes anchored on the solid phase at the end of the reaction. In homogeneous assays, the entire reaction is carried out in a liquid phase. In either approach, the order of addition of reactants is varied to obtain different information about the compounds being tested. For example, test compounds that interfere with the interaction between the target gene products and the binding partners, e.g., by competition, are identified by conducting the reaction in the presence of the test substance; i.e., by adding the test substance to the reaction mixture prior to or simultaneously with the target gene protein and an interacting cellular or extracellular binding partner. Alternatively, test compounds that disrupt preformed complexes, e.g. compounds with higher binding constants that displace one of the components from the complex, are tested by adding the test compound to the reaction mixture after complexes have been formed. The various formats are described briefly below.

[0254] In a heterogeneous assay system, either the target gene protein or the interactive cellular or extracellular binding partner, is anchored onto a solid surface, while the non-anchored species is labeled, either directly or indirectly. In practice, microtiter plates are conveniently utilized. The anchored species is immobilized either by non-covalent or covalent attachment. Non-covalent attachment is accomplished simply by coating the solid surface with a solution of the target gene product or binding partner and drying the coated surface. Alternatively, an immobilized antibody specific for the species to be anchored is used to anchor the species to the solid surface. The surfaces can be prepared in advance and stored.

[0255] In order to conduct the assay, the partner of the immobilized species is exposed to the coated surface with or without the test compound. After the reaction is complete, unreacted components are removed (e.g., by washing) and any complexes formed will remain immobilized on the solid surface. The detection of complexes anchored on the solid surface is accomplished in a number of ways. Where the non-immobilized species is pre-labeled, the detection of label immobilized on the surface indicates that complexes were formed. Where the non-immobilized species is not pre-labeled, an indirect label can be used to detect complexes anchored on the surface; e.g., using a labeled antibody specific for the initially non-immobilized species (the antibody, in turn, is directly labeled or indirectly labeled with a labeled anti-Ig antibody). Depending upon the order of addition of reaction components, test compounds which inhibit complex formation or which disrupt preformed complexes are detected.

[0256] Alternatively, the reaction is conducted in a liquid phase in the presence or absence of the test compound, the reaction products separated from unreacted components, and complexes detected; e.g., using an immobilized antibody specific for one of the binding components to anchor any complexes formed in solution, and a second, labeled antibody specific for the other partner to detect anchored complexes. Again, depending upon the order of addition of reactants to the liquid phase, test compounds which inhibit complex or which disrupt preformed complexes are identified.

[0257] In an alternate embodiment of the invention, a homogeneous assay can be used. In this approach, a preformed complex of the target gene protein and the interacting cellular or extracellular binding partner is prepared in which either the target gene product or its binding partner is labeled, but the signal generated by the label is quenched due to complex formation (see, e.g., U.S. Pat. No. 4,109,496 by Rubenstein which utilizes this approach for immunoassays). The addition of a test substance that competes with and displaces one of the species from the preformed complex results in the generation of a signal above background. In this way, test substances which disrupt target gene protein/cellular or extracellular binding partner interaction are identified.

[0258] In a particular embodiment, the target gene product is prepared for immobilization using recombinant DNA techniques described above. For example, the target gene coding region is fused to a glutathione-S-transferase (GST) gene using a fusion vector, such as pGEX-5X-1, in such a manner that its binding activity is maintained in the resulting fusion protein. The interactive cellular or extracellular binding partner is purified and used to raise a monoclonal antibody, using methods routinely practiced in the art and as described above. This antibody is labeled with the radioactive isotope ¹²⁵I, for example, by methods routinely practiced in the art. In a heterogeneous assay, e.g., the GST-target gene fusion protein is anchored to glutathione-agarose beads. The interactive cellular or extracellular binding partner is then added in the presence or absence of the test compound in a manner that allows interaction and binding to occur. At the end of the reaction period, unbound material can be washed away, and the labeled monoclonal antibody is added to the system and allowed to bind to the complexed components. The interaction between the target gene protein and the interactive cellular or extracellular binding partner is detected by measuring the amount of radioactivity that remains associated with the glutathione-agarose beads. A successful inhibition of the interaction by the test compound results in a decrease in measured radioactivity.

[0259] Alternatively, the GST-target gene fusion protein and the interactive cellular or extracellular binding partner are mixed together in liquid in the absence of the solid glutathione-agarose beads. The test compound is added either during or after the species are allowed to interact. This mixture is added to the glutathione-agarose beads and unbound material is washed away. Again the extent of inhibition of the target gene product/binding partner interaction is detected by adding the labeled antibody and measuring the radioactivity associated with the beads.

[0260] In another embodiment of the invention, these same techniques are employed using peptide fragments that correspond to the binding domains of the target gene product and/or the interactive cellular or extracellular binding partner (in cases where the binding partner is a protein), in place of one or both of the full length proteins. Any number of methods routinely practiced in the art are used to identify and isolate the binding sites. These methods include, but are not limited to, mutagenesis of the gene encoding one of the proteins and screening for disruption of binding in a co-immunoprecipitation assay. Compensating mutations in the gene encoding the second species in the complex are then selected. Sequence analysis of the genes encoding the respective proteins reveals the mutations that correspond to the region of the protein involved in interactive binding. Alternatively, one protein is anchored to a solid surface using methods described above, and allowed to interact with and bind to its labeled binding partner, which has been treated with a proteolytic enzyme, such as trypsin. After washing, a short, labeled peptide comprising the binding domain remains associated with the solid material, and can be isolated and identified by amino acid sequencing. Also, once the gene coding for the cellular or extracellular binding partner is obtained, short gene segments are engineered to express peptide fragments of the protein, which are tested for binding activity and purified or synthesized.

[0261] For example, and not by way of limitation, a target gene product is anchored to a solid material as described, above, by making a GST-target gene fusion protein and allowing it to bind to glutathione agarose beads. The interactive cellular or extracellular binding partner is labeled with a radioactive isotope, such as ³⁵S, and cleaved with a proteolytic enzyme such as trypsin. Cleavage products are added to the anchored GST-target gene fusion protein and allowed to bind. After washing away unbound peptides, labeled bound material, representing the cellular or extracellular binding partner binding domain, is eluted, purified, and analyzed for amino acid sequence by well known methods. Peptides so identified are produced synthetically or fused to appropriate facilitative proteins using well known recombinant DNA technology.

### 5.5.1.2 Screening a Combinatorial Chemical Library

[0262] In one embodiment of the present invention, the proteins encoded by the fungal genes identified using the methods of the present invention are isolated and expressed. These recombinant proteins are then used as targets in assays to screen libraries of compounds for potential drug candidates. The generation of chemical libraries is well known in the art. For example, combinatorial chemistry is used to generate a library of compounds to be screened in the assays described herein. A combinatorial chemical library is a collection of diverse chemical compounds generated by either chemical synthesis or biological synthesis by combining a number of chemical “building block” reagents. For example, a linear combinatorial chemical library such as a polypeptide library is formed by combining amino acids in every possible combination to yield peptides of a given length. Millions of chemical compounds theoretically can be synthesized through such combinatorial mixings of chemical building blocks. For example, one commentator observed that the systematic, combinatorial mixing of 100 interchangeable chemical building blocks results in the theoretical synthesis of 100 million tetrameric compounds or 10 billion pentameric compounds. (Gallop et al., “Applications of Combinatorial Technologies to Drug Discovery, Background and Peptide Combinatorial Libraries,” Journal of Medicinal Chemistry, Vol. 37, No. 9, 1233-1250 (1994). Other chemical libraries known to those in the art may also be used, including natural product libraries.

[0263] Once generated, combinatorial libraries are screened for compounds that possess desirable biological properties. For example, compounds which may be useful as drugs or to develop drugs would likely have the ability to bind to the target protein identified, expressed and purified as discussed above. Further, if the identified target protein is an enzyme, candidate compounds would likely interfere with the enzymatic properties of the target protein. For example, the enzymatic function of a target protein may be to serve as a protease, nuclease, phosphatase, dehydrogenase, transporter protein, transcriptional enzyme, replication component, and any other type of enzyme known or unknown. Thus, the present invention contemplates using the protein products described above to screen combinatorial chemical libraries.

[0264] In some embodiments of the present invention, the biochemical activity of the protein, as well as the chemical structure of a substrate on which the protein acts is known. In other embodiments of the present invention, the biochemical activity of the target protein is unknown and the target protein has no known substrates.

[0265] In some embodiments of the present invention, libraries of compounds are screened to identify compounds that function as inhibitors of the target gene product. First, a library of small molecules is generated using methods of combinatorial library formation well known in the art. U.S. Pat. Nos. 5,463,564 and 5,574, 656, to Agrafiotis, et al., entitled “System and Method of Automatically Generating Chemical Compounds with Desired Properties,” the disclosures of which are incorporated herein by reference in their entireties, are two such teachings. Then the library compounds are screened to identify those compounds that possess desired structural and functional properties. U.S. Pat. No. 5,684,711, the disclosure of which is incorporated herein by reference in its entirety, also discusses a method for screening libraries.

[0266] To illustrate the screening process, the target gene product, an enzyme, and chemical compounds of the library are combined and permitted to interact with one another. A labeled substrate is added to the incubation. The label on the substrate is such that a detectable signal is emitted from metabolized substrate molecules. The emission of this signal permits one to measure the effect of the combinatorial library compounds on the enzymatic activity of target enzymes by comparing it to the signal emitted in the absence of combinatorial library compounds. The characteristics of each library compound are encoded so that compounds demonstrating activity against the enzyme can be analyzed and features common to the various compounds identified can be isolated and combined into future iterations of libraries.

[0267] Once a library of compounds is screened, subsequent libraries are generated using those chemical building blocks that possess the features shown in the first round of screen to have activity against the target enzyme. Using this method, subsequent iterations of candidate compounds will possess more and more of those structural and functional features required to inhibit the function of the target enzyme, until a group of enzyme inhibitors with high specificity for the enzyme can be found. These compounds can then be further tested for their safety and efficacy as antibiotics for use in mammals.

[0268] It will be readily appreciated that this particular screening methodology is exemplary only. Other methods are well known to those skilled in the art. For example, a wide variety of screening techniques are known for a large number of naturally-occurring targets when the biochemical function of the target protein is known. For example, some techniques involve the generation and use of small peptides to probe and analyze target proteins both biochemically and genetically in order to identify and develop drug leads. Such techniques include the methods described in PCT publications No. WO9935494, WO9819162, WO9954728, the disclosures of which are incorporated herein by reference in their entireties.

[0269] Similar methods may be used to identify compounds which inhibit the activity of proteins from organisms other than Candida albicans which are homologous to the Candida albicans target proteins described herein. For example, the proteins may be from animal fugal pathogens such as Aspergillus fumigatus, Aspergillus niger, Aspergillus flavis, Candida tropicalis, Candida parapsilopsis, Candida krusei, Cryptococcus neoformans, Coccidioides immitis, Exophalia dermatiditis, Fusarium oxysporum, Histoplasma capsulatum, Phneumocystis carinii, Trichosporon beigelii, Rhizopus arrhizus, Mucor rouxii, Rhizomucor pusillus, or Absidia corymbigera, or the plant fungal pathogens, such as Botrytis cinerea, Erysiphe graminis, Magnaporthe grisea, Puccinia recodita, Septoria triticii, Tilletia controversa, Ustilago maydis, or any species falling within the genera of any of the above species. In some embodiments, the proteins are from an organism other than Saccharomyces cerevisiae.

### 5.5.1.3 In vitro Enzyme Assays

[0270] In one embodiment, GRACE methods and strains can be used to develop in vitro assays for biochemical activities that are shown to be essential to cell viability. A number of essential genes identified by the GRACE conditional expression methodologies display statistically significant similarity to biochemically characterized gene products from other organisms. For example, based on amino acid sequence similarity, a number of essential and fungal specific genes have been predicted to possess the following biochemical activities:

| | |
|---|---|
| CaRHO1 | GTPase involved in (1,3)-β-glucan synthesis |
| | and polarity |
| CaYHR118c (ORC6) | Origin of replication complex subunit |
| CaYPL128c (TBP1) | Telomere binding protein |
| CaYNL256w | Dihydropteroate synthase |
| CaYKL004w (AUR1) | Phosphatidylinositol: ceramide phosphoinositol |
| | transferase |
| CaYJL090c (DPB11) | DNA polB subunit |
| CaYOL149w (DCP1) | mRNA decapping enzyme |
| CaYNL151c (RPC31) | RNA polIII subunit |
| CaYOR148c (SPP2) | RNA splicing |
| CaYER026c (CHO1) | Phosphatidylserine synthase |

[0271] Therefore, the sequences of the essential genes of the invention can be subjected to analysis, and based on the results, a number of well characterized standard in vitro biochemical assays (e.g., DNA binding, RNA processing, GTP binding and hydrolysis, and phosphorylation, etc.) can be readily adapted for testing the gene products of the invention. Any assays known in the art for enzymes with similar biochemical activities (e.g., mechanism of action, class of substrate) can be modified for screening for inhibitors of the enzymes encoded by these essential genes.

[0272] For example, targets with characteristics similar to CaRHO1 can be used within a in vitro-based drug screen by adapting standard GTPase assays developed for a wide range of such proteins. Alternatively, novel assays are developed using biochemical information pertaining to validated drug targets within our GRACE strain collection. Any assays known in the art for enzymes with similar biochemical activities (e.g., mechanism of action, class of substrate) are adapted for screening for inhibitors of the enzymes encoded by these essential C. albicans genes.

[0273] For example, a number of features make the C. albicans gene, CaTBF1, a candidate for in vitro assay development. CaTBF1 shares significant homology to its S. cerevisiae counterpart, TBF1, a telomere binding factor. In addition, the DNA sequence CaTBF1p recognizes is known and is relatively short (Koering et al., Nucleic Acid Res. 28:2519-2526, which is incorporated herein by reference in its entirety), enabling inexpensive synthesis of oligonucleotides corresponding to this element. Moreover since this assay only requires the target protein and a DNA fragment containing the nucleotide sequence it recognizes, only purification of CaTBF1p protein is necessary in order to develop an in vitro binding assay. One preferred embodiment of this in vitro assay involves crosslinking the DNA element to the bottom of a well, incubation of radiolabeled CaTBF1p to facilitate protein-DNA binding, a series of washes to remove unbound material, and determination of the percentage of bound radiolabeled CaTBF1p. Alternatively, purified CaTBF1p is attached to the well and radiolabeled oligonucleotides added. Drug screening, including the use of high throughput screening technique, is performed by searching for compounds that inhibit the protein-DNA binding measured in this assay.

[0274] In another example, CaORC6 can also be used in this type of assay since its S. cerevisiae homolog, ORC6, directly binds a DNA element within the origin of replication of yeast chromosomes (Mizushima et al., 2000, Genes & Development 14:1631-1641, which is incorporated herein by reference in its entirety). Biochemical purification of any of these targets could be achieved, for example, by PCR-based construction of C. albicans heterozygous strains in which the gene encoding the CaORC6 protein has been modified to include a carboxy-terminal hexahistidine tag enabling purification of the chimeric protein using standard Ni⁺² affinity column chromatography techniques.

[0275] The above principle can be applied to any of the gene products disclosed in the present invention that exhibit nucleic acid binding characteristics.

[0276] For other targets similar to CaDPB11, a homolog of which in S. cerevisiae encode proteins that physically associate with Sld2p (Kamimura et al., 1998, Cell Biol. 18:6102-6109, which is incorporated herein by reference in its entirety), in vitro assays similar to those described above are developed. In addition, two-hybrid assays based on known physical interactions are developed for any validated targets within the GRACE strain collection.

[0277] The present invention also provides cell extracts useful in establishing in vitro assays for suitable biochemical targets. For example, in an embodiment of the present invention, GRACE-derived C. albicans strains are grown either under constitutive expression conditions or transcription repression conditions to either overproduce or deplete a particular gene product. Cellular extracts resulting from strains incubated under these two conditions are compared with extracts prepared from identically-grown wild type strains. These extracts are then used for the rapid evaluation of targets using existing in vitro assays or new assays directed toward novel gene products, without having to purify the gene product. Such a whole cell extract approach to in vitro assay development is typically necessary for targets involved in cell wall biosynthetic pathways (e.g. (1,3)-β-glucan synthesis or chitin synthesis) which involve multiple gene products that transit the secretory pathway before receiving essential post-translational modifications required for their functional activity. GRACE-derived strains for conditional expression of target genes involved in these, or other cell wall pathways (e.g. (1,6)-β-glucan synthesis) enable in vitro assays to be performed directly in C. albicans.

### 5.5.2 Cell-Based Screening Assays

[0278] In various embodiments, the essential genes identified by the methods of the invention can be used in cell-based screening assays. Generally, the target essential gene in a cell can be engineered to be overexpressed or underexpressed constitutively or inducibly. Given that the identity of an essential gene is known, the construction of such cells can be accomplished by methods well known in the art. The GRACE strains of the invention is a non-limiting example of the type of genetically engineered cells that can be used in the cell-based screening assays of the invention.

[0279] Current cell-based assays used to identify or to characterize compounds for drug discovery and development frequently depend on detecting the ability of a test compound to modulate the activity of a target molecule located within a cell or located on the surface of a cell. Most often such target molecules are proteins such as enzymes, receptors and the like. However, target molecules also include other molecules such as DNAs, lipids, carbohydrates and RNAs including messenger RNAs, ribosomal RNAs, tRNAs and the like. A number of highly sensitive cell-based assay methods are available to those of skill in the art to detect binding and interaction of test compounds with specific target molecules. However, these methods are generally not highly effective when the test compound binds to or otherwise interacts with its target molecule with moderate or low affinity. In addition, the target molecule may not be readily accessible to a test compound in solution, such as when the target molecule is located inside the cell or within a cellular compartment such as the periplasm of a bacterial cell. Thus, current cell-based assay methods are limited in that they are not effective in identifying or characterizing compounds that interact with their targets with moderate to low affinity or compounds that interact with targets that are not readily accessible.

[0280] The cell-based assay methods of the present invention have substantial advantages over current cell-based assays. These advantages derive from the use of sensitized cells in which the level or activity of at least one gene product required for fungal proliferation, virulence, or pathogenicity (the target molecule) has been reduced, and preferably specifically reduced to the point where the presence or absence of its function becomes a rate-determining step for fungal growth, survival, proliferation, virulence, or pathogenicity. Such sensitized cells become much more sensitive to compounds that are active against the affected target molecule. For example, sensitized cells are obtained by growing a GRACE strain in the presence of a concentration of inducer or repressor which provides a level of a gene product required for fungal growth, survival, proliferation, virulence, or pathogenicity such that the presence or absence of its function becomes a rate-determining step for fungal growth, survival, proliferation, virulence, or pathogenicity. Thus, cell-based assays of the present invention are capable of detecting compounds exhibiting low or moderate potency against the target molecule of interest because such compounds are substantially more potent on sensitized cells than on non-sensitized cells. The effect may be such that a test compound may be two to several times more potent, at least 10 times more potent, at least 20 times more potent, at least 50 times more potent, at least 100 times more potent, at least 1000 times more potent, or even more than 1000 times more potent when tested on the sensitized cells as compared to the non-sensitized cells.

[0281] Due in part to the increased appearance of antibiotic resistance in pathogenic microorganisms and to the significant side-effects associated with some currently used antibiotics, novel antibiotics acting at new targets are highly sought after in the art. Yet, another limitation in the current art related to cell-based assays is the problem of repeatedly identifying hits against the same kinds of target molecules in the same limited set of biological pathways. This may occur when compounds acting at such new targets are discarded, ignored or fail to be detected because compounds acting at the “old” targets are encountered more frequently and are more potent than compounds acting at the new targets. As a result, the majority of antibiotics in use currently interact with a relatively small number of target molecules within an even more limited set of biological pathways.

[0282] The use of sensitized cells of the current invention provides a solution to the above problems in two ways. First, desired compounds acting at a target of interest, whether a new target or a previously known but poorly exploited target, can now be detected above the “noise” of compounds acting at the “old” targets due to the specific and substantial increase in potency of such desired compounds when tested on the sensitized cells of the current invention. Second, the methods used to sensitize cells to compounds acting at a target of interest may also sensitize these cells to compounds acting at other target molecules within the same biological pathway. For example, expression of a gene encoding a ribosomal protein at a level such that the function of the ribosomal protein becomes rate limiting for fungal growth, survival, proliferation, virulence, or pathogenicity is expected to sensitize the cell to compounds acting at that ribosomal protein to compounds acting at any of the ribosomal components (proteins or rRNA) or even to compounds acting at any target which is part of the protein synthesis pathway. Thus an important advantage of the present invention is the ability to reveal new targets and pathways that were previously not readily accessible to drug discovery methods.

[0283] Sensitized cells of the present invention are prepared by reducing the activity or level of a target molecule. The target molecule may be a gene product, such as an RNA or polypeptide produced from the nucleic acids required for fungal growth, survival, proliferation, virulence, or pathogenicity described herein. In addition, the target may be an RNA or polypeptide in the same biological pathway as the nucleic acids required for fungal growth, survival, proliferation, virulence, or pathogenicity as described herein. Such biological pathways include, but are not limited to, enzymatic, biochemical and metabolic pathways as well as pathways involved in the production of cellular structures such as the cell membrane.

[0284] Current methods employed in the arts of medicinal and combinatorial chemistries are able to make use of structure-activity relationship information derived from testing compounds in various biological assays including direct binding assays and cell-based assays. Occasionally compounds are directly identified in such assays that are sufficiently potent to be developed as drugs. More often, initial hit compounds exhibit moderate or low potency. Once a hit compound is identified with low or moderate potency, directed libraries of compounds are synthesized and tested in order to identify more potent leads. Generally these directed libraries are combinatorial chemical libraries consisting of compounds with structures related to the hit compound but containing systematic variations including additions, subtractions and substitutions of various structural features. When tested for activity against the target molecule, structural features are identified that either alone or in combination with other features enhance or reduce activity. This information is used to design subsequent directed libraries containing compounds with enhanced activity against the target molecule. After one or several iterations of this process, compounds with substantially increased activity against the target molecule are identified and may be further developed as drugs. This process is facilitated by use of the sensitized cells of the present invention since compounds acting at the selected targets exhibit increased potency in such cell-based assays, thus; more compounds can now be characterized providing more useful information than would be obtained otherwise.

[0285] Thus, it is now possible using cell-based assays of the present invention to identify or characterize compounds that previously would not have been readily identified or characterized including compounds that act at targets that previously were not readily exploited using cell-based assays. The process of evolving potent drug leads from initial hit compounds is also substantially improved by the cell-based assays of the present invention because, for the same number of test compounds, more structure-function relationship information is likely to be revealed.

[0286] The method of sensitizing a cell entails selecting a suitable gene. A suitable gene is one whose expression is required for the growth, survival, proliferation, virulence, or pathogenicity of the cell to be sensitized. The next step is to obtain a cell in which the level or activity of the target can be reduced to a level where it is rate limiting for growth, survival, proliferation, virulence or pathogenicity. For example, the cell may be a GRACE strain in which the selected gene is under the control of a regulatable promoter. The amount of RNA transcribed from the selected gene is limited by varying the concentration of an inducer or repressor which acts on the regulatable promoter, thereby varying the activity of the promoter driving transcription of the RNA. Thus, cells are sensitized by exposing them to an inducer or repressor concentration that results in an RNA level such that the function of the selected gene product becomes rate limiting for fungal growth, survival, proliferation, virulence, or pathogenicity.

[0287] In one embodiment of the cell-based assays, GRACE strains, in which the sequences required for fungal growth, survival, proliferation, virulence, or pathogenicity of Candida albicans described herein are under the control of a regulatable promoter, are grown in the presence of a concentration of inducer or repressor which causes the function of the gene products encoded by these sequences to be rate limiting for fungal growth, survival, proliferation, virulence, or pathogenicity. To achieve that goal, a growth inhibition dose curve of inducer or repressor is calculated by plotting various doses of inducer or repressor against the corresponding growth inhibition caused by the limited levels of the gene product required for fungal proliferation. From this dose-response curve, conditions providing various growth rates, from 1 to 100% as compared to inducer or repressor-free growth, can be determined. For example, if the regulatable promoter is repressed by tetracycline, the GRACE strain may be grown in the presence of varying levels of tetracyline. Similarly, inducible promoters may be used. In this case, the GRACE strains are grown in the presence of varying concentrations of inducer. For example, the highest concentration of the inducer or repressor that does not reduce the growth rate significantly can be estimated from the dose-response curve. Cellular proliferation can be monitored by growth medium turbidity via OD measurements. In another example, the concentration of inducer or repressor that reduces growth by 25% can be predicted from the dose-response curve. In still another example, a concentration of inducer or repressor that reduces growth by 50% can be calculated from the dose-response curve. Additional parameters such as colony forming units (cfu) are also used to measure cellular growth, survival and/or viability.

[0288] In another embodiment of the present invention, an individual haploid strain may similarly be used as the basis for detection of an antifungal or therapeutic agent. In this embodiment, the test organism (e.g. Aspergillus, fumigatus, Cryptococcus neoformans, Magnaportha grisea or any other haploid organisms represented in Table I) is a strain constructed by modifying the single allele of the target gene in one step by recombination with a promoter replacement fragment comprising a heterologous regulatable promoter, such that the expression of the gene is conditionally regulated by the heterologous promoter. Like individual diploid GRACE strains, sensitized haploid cells may similarly be used in whole cell-based assay methods to identify compounds displaying a preferential activity against the affected target.

[0289] In various embodiments, the modified strain is grown under a first set of conditions where the heterologous promoter is expressed at a relatively low level (i.e. partially repressed) and the extent of growth determined. This experiment is repeated in the presence of a test compound and a second measurement of growth obtained. The extent of growth in the presence and in the absence of the test compound are then compared to provide a first indicator value. Two further experiments are performed, using non-repressing growth conditions where the target gene is expressed at substantially higher levels than in the first set of conditions. The extent of growth is determined in the presence and absence of the test compound under the second set of conditions to obtain a second indicator value. The first and second indicator values are then compared. If the indicator values are essentially the same, the data suggest that the test compound does not inhibit the test target. However, if the two indicator values are substantially different, the data indicates that the level of expression of the target gene product may determine the degree of inhibition by the test compound and, therefore, it is likely that the gene product is the target of that test compound. Whole-cell assays comprising collections or subsets of multiple sensitized strains may also be screened, for example, in a series of 96-well, 384-well, or even 1586-well microtiter plates, with each well containing individual strains sensitized to identify compounds displaying a preferential activity against each affected target comprising a target set or subset selected from, but not limited to the group consisting of fungal-specific, pathogen-specific, desired biochemical-function, human-homolog, cellular localization, and signal transduction cascade target sets.

[0290] Cells to be assayed are exposed to the above-determined concentrations of inducer or repressor. The presence of the inducer or repressor at this sub-lethal concentration reduces the amount of the proliferation-required gene product to the lowest amount in the cell that will support growth. Cells grown in the presence of this concentration of inducer or repressor are therefore specifically more sensitive to inhibitors of the proliferation-required protein or RNA of interest as well as to inhibitors of proteins or RNAs in the same biological pathway as the proliferation-required protein or RNA of interest but not specifically more sensitive to inhibitors of unrelated proteins or RNAs.

[0291] Cells pretreated with sub-inhibitory concentrations of inducer or repressor, which therefore contain a reduced amount of proliferation-required target gene product, are used to screen for compounds that reduce cell growth. The sub-lethal concentration of inducer or repressor may be any concentration consistent with the intended use of the assay to identify candidate compounds to which the cells are more sensitive than are control cells in which this gene product is not rate-limiting. For example, the sub-lethal concentration of the inducer or repressor may be such that growth inhibition is at least about 5%, at least about 8%, at least about 10%, at least about 20%, at least about 30%, at least about 40%, at least about 50%, at least about 60% at least about 75%, at least 80%, at least 90%, at least 95% or more than 95%. Cells which are pre-sensitized using the preceding method are more sensitive to inhibitors of the target protein because these cells contain less target protein to inhibit than wild-type cells.

[0292] It will be appreciated that similar methods may be used to identify compounds which inhibit virulence or pathogenicity. In such methods, the virulence or pathogenicity of cells exposed to the candidate compound which express rate limiting levels of a gene product involved in virulence or pathogenicity is compared to the virulence or pathogenicity of cells exposed to the candidate compound in which the levels of the gene product are not rate limiting. Virulence or pathogenicity may be measured using the techniques described herein.

[0293] In another embodiment of the cell-based assays of the present invention, the level or activity of a gene product required for fungal growth, survival, proliferation, virulence, or pathogenicity is reduced using a mutation, such as a temperature sensitive mutation, in the sequence required for fungal growth, survival, proliferation, virulence, or pathogenicity and an inducer or repressor level which, in conjunction with the temperature sensitive mutation, provides levels of the gene product required for fungal growth, survival, proliferation, virulence, or pathogenicity which are rate limiting for proliferation. Growing the cells at an intermediate temperature between the permissive and restrictive temperatures of the temperature sensitive mutant where the mutation is in a gene required for fungal growth, survival, proliferation, virulence, or pathogenicity produces cells with reduced activity of the gene product required for growth, survival, proliferation, virulence, or pathogenicity. The concentration of inducer or repressor is chosen so as to further reduces the activity of the gene product required for fungal growth, survival, proliferation, virulence, or pathogenicity. Drugs that may not have been found using either the temperature sensitive mutation or the inducer or repressor alone may be identified by determining whether cells in which expression of the nucleic acid encoding the proliferation-required gene product has been reduced and which are grown at a temperature between the permissive temperature and the restrictive temperature are substantially more sensitive to a test compound than cells in which expression of the gene product required for fungal growth, survival, proliferation, virulence, or pathogenicity has not been reduced and which are grown at a permissive temperature. Also drugs found previously from either the use of the inducer or repressor alone or the temperature sensitive mutation alone may have a different sensitivity profile when used in cells combining the two approaches, and that sensitivity profile may indicate a more specific action of the drug in inhibiting one or more activities of the gene product.

[0294] Temperature sensitive mutations may be located at different sites within a gene and may lie within different domains of the protein. For example, the dnaB gene of Escherichia coli encodes the replication fork DNA helicase. DnaB has several domains, including domains for oligomerization, ATP hydrolysis, DNA binding, interaction with primase, interaction with DnaC, and interaction with DnaA. Temperature sensitive mutations in different domains of DnaB confer different phenotypes at the restrictive temperature, which include either an abrupt stop or a slow stop in DNA replication either with or without DNA breakdown (Wechsler, J. A. and Gross, J. D. 1971 Escherichia coli mutants temperature-sensitive for DNA synthesis. Mol. Gen. Genetics 113:273-284) and termination of growth or cell death. Thus, temperature sensitive mutations in different domains of the protein may be used in conjunction with GRACE strains in which expression of the protein is under the control of a regulatable promoter.

[0295] It will be appreciated that the above method may be performed with any mutation which reduces but does not eliminate the activity or level of the gene product which is required for fungal growth, survival, proliferation, virulence, or pathogenicity.

[0296] When screening for antimicrobial agents against a gene product required for fungal growth, survival, proliferation, virulence, or pathogenicity, growth inhibition, virulence or pathogenicity of cells containing a limiting amount of that gene product can be assayed. Growth inhibition can be measured by directly comparing the amount of growth, measured by the optical density of the culture relative to uninoculated growth medium, between an experimental sample and a control sample. Alternative methods for assaying cell proliferation include measuring green fluorescent protein (GFP) reporter construct emissions, various enzymatic activity assays, and other methods well known in the art. Virulence and pathogenicity may be measured using the techniques described herein.

[0297] It will be appreciated that the above method may be performed in solid phase, liquid phase, a combination of the two preceding media, or in vivo. For example, cells grown on nutrient agar containing the inducer or repressor which acts on the regulatable promoter used to express the proliferation required gene product may be exposed to compounds spotted onto the agar surface. A compound's effect may be judged from the diameter of the resulting killing zone, the area around the compound application point in which cells do not grow. Multiple compounds may be transferred to agar plates and simultaneously tested using automated and semi-automated equipment including but not restricted to multi-channel pipettes (for example the Beckman Multimek) and multi-channel spotters (for example the Genomic Solutions Flexys). In this way multiple plates and thousands to millions of compounds may be tested per day.

[0298] The compounds are also tested entirely in liquid phase using microtiter plates as described below. Liquid phase screening may be performed in microtiter plates containing 96, 384, 1536 or more wells per microtiter plate to screen multiple plates and thousands to millions of compounds per day. Automated and semi-automated equipment are used for addition of reagents (for example cells and compounds) and for determination of cell density.

[0299] The compounds are also tested in vivo using the methods described herein.

[0300] It will be appreciated that each of the above cell-based assays may be used to identify compounds which inhibit the activity of gene products from organisms other than Candida albicans which are homologous to the Candida albicans gene products described herein. For example, the target gene products may be from animal fugal pathogens such as Aspergillus fumigatus, Aspergillus niger, Aspergillus flavis, Candida tropicalis, Candida parapsilopsis, Candida krusei, Cryptococcus neoformans, Coccidioides immitis, Exophalia dermatiditis, Fusarium oxysporum, Histoplasma capsulatum, Phneumocystis carinii, Trichosporon beigelii, Rhizopus arrhizus, Mucor rouxii, Rhizomucor pusillus, or Absidia corymbigera, or the plant fungal pathogens, such as Botrytis cinerea, Erysiphe graminis, Magnaporthe grisea, Puccinia recodita, Septoria triticii, Tilletia controversa, Ustilago maydis, or any species falling within the genera of any of the above species. In some embodiments, the gene products are from an organism other than Saccharomyces cerevisiae.

### 5.5.2.1 Cell-Based Assays Using GRACE Strains

[0301] GRACE strains in which one allele of a gene required for fungal growth, survival, proliferation, virulence, or pathogenicity is inactivated while the other allele is under the control of a regulatable promoter are constructed using the methods described herein. For the purposes of the present example, the regulatable promoter may be the tetracycline regulated promoter described herein, but it will be appreciated that any regulatable promoter may be used.

[0302] In one embodiment of the present invention, an individual GRACE strain is used as the basis for detection of a therapeutic agent active against a diploid pathogenic fungal cell. In this embodiment, the test organism is a GRACE strain having a modified allelic gene pair, where the first allele of the gene has been inactivated by the insertion of, or replacement by, a nucleotide sequence encoding an expressible, dominant selectable marker and the second allele has been modified, by recombination, to place the second allele under the controlled expression of a heterologous promoter. This test GRACE strain is then grown under a first set of conditions where the heterologous promoter is expressed at a relatively low level (“repressing”) and the extent of growth determined. This measurement may be carried out using any appropriate standard known to those skilled in the art including optical density, wet weight of pelleted cells, total cell count, viable count, DNA content, and the like. This experiment is repeated in the presence of a test compound and a second measurement of growth obtained. The extent of growth in the presence and in the absence of the test compound, which can conveniently be expressed in terms of indicator values, are then compared. A dissimilarity in the extent of growth or indicator values provides an indication that the test compound may interact with the target essential gene product.

[0303] To gain more information, two further experiments are performed, using a second set of “non-repressing” growth conditions where the second allele, under the control of the heterologous promoter, is expressed at a level substantially higher than in the first set of conditions described above. The extent of growth or indicator values is determined in the presence and absence of the test compound under this second set of conditions. The extent of growth or indicator values in the presence and in the absence of the test compound are then compared. A dissimilarity in the extent of growth or indicator values provides an indication that may interact with the target essential gene product.

[0304] Furthermore, the extent of growth in the first and in the second set of growth conditions can also be compared. If the extent of growth is essentially the same, the data suggest that the test compound does not inhibit the gene product encoded by the modified allelic gene pair carried by the GRACE strain tested. However, if the extent of growth are substantially different, the data indicate that the level of expression of the subject gene product may determine the degree of inhibition by the test compound and, therefore, it is likely that the subject gene product is the target of that test compound.

[0305] Although each GRACE strain can be tested individually, it will be more efficient to screen entire sets or subsets of a GRACE strain collection at one time. Therefore in one aspect of this invention, arrays may be established, for example in a series of 96-well microtiter plates, with each well containing a single GRACE strain. In one representative, but not limiting approach, four microtiter plates are used, comprising two pairs where the growth medium in one pair supports greater expression of the heterologous promoter controlling the remaining active allele in each strain, than the medium in the other pair of plates. One member of each pair is supplemented with a compound to be tested and measurements of growth of each GRACE strain is determined using standard procedures to provide indicator values for each isolate tested. The collection of diploid pathogenic GRACE strains used in such a method for screening for therapeutic agents may comprise, for example, a substantially complete set of all the modified allelic gene pairs of the organism, the substantially complete set of all the modified allelic essential gene pairs of the organism or the collection may be selected from a subset of GRACE strains selected from, but not limited to the group consisting of fungal-specific, pathogen-specific, desired biochemical-function, human-homolog, cellular localization, and signal transduction cascade target sets.

[0306] The GRACE strains are grown in medium comprising a range of tetracycline concentrations to obtain the growth inhibitory dose-response curve for each strain. First, seed cultures of the GRACE strains are grown in the appropriate medium. Subsequently, aliquots of the seed cultures are diluted into medium containing varying concentrations of tetracycline. For example, the GRACE strains may be grown in duplicate cultures containing two-fold serial dilutions of tetracycline. Additionally, control cells are grown in duplicate without tetracycline. The control cultures are started from equal amounts of cells derived from the same initial seed culture of a GRACE strain of interest. The cells are grown for an appropriate period of time and the extent of growth is determined using any appropriate technique. For example, the extent of growth may be determined by measuring the optical density of the cultures. When the control culture reaches mid-log phase the percent growth (relative to the control culture) for each of the tetracycline containing cultures is plotted against the log concentrations of tetracycline to produce a growth inhibitory dose response curve for tetracycline. The concentration of tetracycline that inhibits cell growth to 50% (IC₅₀) as compared to the 0 mM tetracyline control (0% growth inhibition) is then calculated from the curve. Alternative methods of measuring growth are also contemplated. Examples of these methods include measurements of proteins, the expression of which is engineered into the cells being tested and can readily be measured. Examples of such proteins include green fluorescent protein (GFP) and various enzymes.

[0307] Cells are pretreated with the selected concentration of tetracycline and then used to test the sensitivity of cell populations to candidate compounds. For example, the cells may be pretreated with a concentration of tetracycline which inhibits growth by at least about 5%, at least about 8%, at least about 10%, at least about 20%, at least about 30%, at least about 40%, at least about 50%, at least about 60% at least about 75%, at least 80%, at least 90%, at least 95% or more than 95%. The cells are then contacted with the candidate compound and growth of the cells in tetracycline containing medium is compared to growth of the control cells in medium which lacks tetracycline to determine whether the candidate compound inhibits growth of the sensitized cells (i.e. the cells grown in the presence of tetracycline). For example, the growth of the cells in tetracycline containing medium may be compared to the growth of the cells in medium lacking tetracycline to determine whether the candidate compound inhibits the growth of the sensitized cells (i.e. the cells grown in the presence of tetracyline) to a greater extent than the candidate compound inhibits the growth of cells grown in the absence of tetracycline. For example, if a significant difference in growth is observed between the sensitized cells (i.e. the cells grown in the presence of tetracycline) and the non-sensitized cells (i.e. the cells grown in the absence of tetracycline), the candidate compound may be used to inhibit the proliferation of the organism or may be further optimized to identify compounds which have an even greater ability to inhibit the growth, survival, or proliferation of the organism.

[0308] Similarly, the virulence or pathogenicity of cells exposed to a candidate compound which express a rate limiting amount of a gene product required for virulence or pathogenicity may be compared to the virulence or pathogenicity of cells exposed to the candidate compound in which the level of expression of the gene product required for virulence or pathogenicity is not rate limiting. In such methods, test animals are challenged with the GRACE strain and fed a diet containing the desired amount of tetracycline and the candidate compound. Thus, the GRACE strain infecting the test animals expresses a rate limiting amount of a gene product required for virulence or pathogenicity (i.e. the GRACE cells in the test animals are sensitized). Control animals are challenged with the GRACE strain and are fed a diet containing the candidate compound but lacking tetracycline. The virulence or pathogenicity of the GRACE strain in the test animals is compared to that in the control animals. For example, the virulence or pathogenicity of the GRACE strain in the test animals may be compared to that in the control animals to determine whether the candidate compound inhibits the virulence or pathogenicity of the sensitized GRACE cells (i.e. the cells in the animals whose diet included tetracyline) to a greater extent than the candidate compound inhibits the growth of the GRACE cells in animals whose diet lacked tetracycline. For example, if a significant difference in growth is observed between the sensitized GRACE cells (i.e. the cells in animals whose diet included tetracycline) and the non-sensitized cells (i.e. the GRACE cells in animals whose diet did not include tetracycline), the candidate compound may be used to inhibit the virulence or pathogenicity of the organism or may be further optimized to identify compounds which have an even greater ability to inhibit the virulence or pathogenicity of the organism. Virulence or pathogenicity may be measured using the techniques described therein.

[0309] It will be appreciated that the above cell-based assays may be used to identify compounds which inhibit the activity of gene products from organisms other than Candida albicans which are homologous to the Candida albicans gene products described herein. For example, the gene products may be from animal fugal pathogens such as Aspergillus fumigatus, Aspergillus niger, Aspergillus flavis, Candida tropicalis, Candida parapsilopsis, Candida krusei, Cryptococcus neoformans, Coccidioides immitis, Exophalia dermatiditis, Fusarium oxysporum, Histoplasma capsulatum, Phneumocystis carinii, Trichosporon beigelii, Rhizopus arrhizus, Mucor rouxii, Rhizomucor pusillus, or Absidia corymbigera, or the plant fungal pathogens, such as Botrytis cinerea, Erysiphe graminis, Magnaporthe grisea, Puccinia recodita, Septoria triticii, Tilletia controversa, Ustilago maydis, or any species falling within the genera of any of the above species. In some embodiments, the gene products are from an organism other than Saccharomyces cerevisae.

[0310] The cell-based assay described above may also be used to identify the biological pathway in which a nucleic acid required for fungal proliferation, virulence or pathogenicity or the gene product of such a nucleic acid lies. In such methods, cells expressing a rate limiting level of a target nucleic acid required for fungal proliferation, virulence or pathogenicity and control cells in which expression of the target nucleic acid is not rate limiting are contacted with a panel of antibiotics known to act in various pathways. If the antibiotic acts in the pathway in which the target nucleic acid or its gene product lies, cells in which expression of target nucleic acid is rate limiting will be more sensitive to the antibiotic than cells in which expression of the target nucleic acid is not rate limiting.

[0311] As a control, the results of the assay may be confirmed by contacting a panel of cells in which the levels of many different genes required for proliferation, virulence or pathogenicity, including the target gene, is rate limiting. If the antibiotic is acting specifically, heightened sensitivity to the antibiotic will be observed only in the cells in which the target gene is rate limiting (or cells in which genes in the same pathway as the target gene is rate limiting) but will not be observed generally in which a gene product required for proliferation, virulence or pathogenicity is rate limiting.

[0312] It will be appreciated that the above method for identifying the biological pathway in which a nucleic acid required for proliferation, virulence or pathogenicity lies may be applied to nucleic acids from organisms other than Candida albicans which are homologous to the Candida albicans nucleic acids described herein. For example, the nucleic acids may be from animal fugal pathogens such as Aspergillus fumigatus, Aspergillus niger, Aspergillus flavis, Candida tropicalis, Candida parapsilopsis, Candida krusei, Cryptococcus neoformans, Coccidioides immitis, Exophalia dermatiditis, Fusarium oxysporum, Histoplasma capsulatum, Phneumocystis carinii, Trichosporon beigelii, Rhizopus arrhizus, Mucor rouxii, Rhizomucor pusillus, or Absidia corymbigera, or the plant fungal pathogens, such as Botrytis cinerea, Erysiphe graminis, Magnaporthe grisea, Puccinia recodita, Septoria triticii, Tilletia controversa, Ustilago maydis, or any species falling within the genera of any of the above species. In some embodiments, the nucleic acids are from an organism other than Saccharomyces cerevisae.

[0313] Similarly, the above method may be used to determine the pathway on which a test compound, such as a test antibiotic acts. A panel of cells, each of which expresses a rate limiting amount of a gene product required for fungal proliferation, virulence or pathogenicity where the gene product lies in a known pathway, is contacted with a compound for which it is desired to determine the pathway on which it acts. The sensitivity of the panel of cells to the test compound is determined in cells in which expression of the nucleic acid encoding the gene product required for proliferation, virulence or pathogenicity is at a rate limiting level and in control cells in which expression of the gene product required for proliferation, virulence or pathogenicity is not at a rate limiting level. If the test compound acts on the pathway in which a particular gene product required for proliferation, virulence, or pathogenicity lies, cells in which expression of that particular gene product is at a rate limiting level will be more sensitive to the compound than the cells in which gene products in other pathways are at a rate limiting level. In addition, control cells in which expression of the particular gene required for fungal proliferation, virulence or pathogenicity is not rate limiting will not exhibit heightened sensitivity to the compound. In this way, the pathway on which the test compound acts may be determined.

[0314] It will be appreciated that the above method for determining the pathway on which a test compound acts may be applied to organisms other than Candida albicans by using panels of cells in which the activity or level of gene products which are homologous to the Candida albicans gene products described herein is rate limiting. For example, the gene products may be from animal fugal pathogens such as Aspergillus fumigatus, Aspergillus niger, Aspergillus flavis, Candida tropicalis, Candida parapsilopsis, Candida krusei, Cryptococcus neoformans, Coccidioides immitis, Exophalia dermatiditis, Fusarium oxysporum, Histoplasma capsulatum, Pneumocystis carinii, Trichosporon beigelii, Rhizopus arrhizus, Mucor rouxii, Rhizomucor pusillus, or Absidia corymbigera, or the plant fungal pathogens, such as Botrytis cinerea, Erysiphe graminis, Magnaporthe grisea, Puccinia recodita, Septoria triticii, Tilletia controversa, Ustilago maydis, or any species falling within the genera of any of the above species. In some embodiments, the gene products are from an organism other than Saccharomyces cerevisiae. Example 6.4, infra, provided below describes one method for performing such assays.

[0315] One skilled in the art will appreciate that further optimization of the assay conditions, such as the concentration of inducer or repressor used to produce rate limiting levels of a gene product required for fungal proliferation, virulence or pathogenicity and/or the growth conditions used for the assay (for example incubation temperature and medium components) may further increase the selectivity and/or magnitude of the antibiotic sensitization exhibited.

[0316] It will be appreciated that the above methods for identifying the pathway in which a gene required for growth, survival, proliferation, virulence or pathogenicity lies or the pathway on which an antibiotic acts may be performed using organisms other than Candida albicans in which gene products homologous to the Candida albicans gene products described herein are rate limiting. For example, the gene products may be from animal fugal pathogens such as Aspergillus fumigatus, Aspergillus niger, Aspergillus flavis, Candida tropicalis, Candida parapsilopsis, Candida krusei, Cryptococcus neoformans, Coccidioides immitis, Exophalia dermatiditis, Fusarium oxysporum, Histoplasma capsulatum, Pneumocystis carinii, Trichosporon beigelii, Rhizopus arrhizus, Mucor rouxii, Rhizomucor pusillus, or Absidia corymbigera, or the plant fungal pathogens, such as Botrytis cinerea, Erysiphe graminis, Magnaporthe grisea, Puccinia recodita, Septoria triticii, Tilletia controversa, Ustilago maydis, or any species falling within the genera of any of the above species. In some embodiments, the gene products are from an organism other than Saccharomyces cerevisae.

[0317] Furthermore, as discussed above, panels of GRACE strains may be used to characterize the point of intervention of any compound affecting an essential biological pathway including antibiotics with no known mechanism of action.

[0318] Another embodiment of the present invention is a method for determining the pathway against which a test antibiotic compound is active, in which the activity of proteins or nucleic acids involved in pathways required for fungal growth, survival, proliferation, virulence or pathogenicity is reduced by contacting cells with a sub-lethal concentration of a known antibiotic which acts against the protein or nucleic acid. The method is similar to those described above for determining which pathway a test antibiotic acts against, except that rather than reducing the activity or level of a gene product required for fungal proliferation, virulence or pathogenicity by expressing the gene product at a rate limiting amount in a GRACE strain, the activity or level of the gene product is reduced using a sub-lethal level of a known antibiotic which acts against the gene product.

[0319] Growth inhibition resulting from the presence of sub-lethal concentration of the known antibiotic may be at least about 5%, at least about 8%, at least about 10%, at least about 20%, at least about 30%, at least about 40%, at least about 50%, at least about 60%, or at least about 75%, at least 80%, at least 90%, at least 95% or more than 95%.

[0320] Alternatively, the sub-lethal concentration of the known antibiotic may be determined by measuring the activity of the target proliferation-required gene product rather than by measuring growth inhibition.

[0321] Cells are contacted with a combination of each member of a panel of known antibiotics at a sub-lethal level and varying concentrations of the test antibiotic. As a control, the cells are contacted with varying concentrations of the test antibiotic alone. The IC₅₀ of the test antibiotic in the presence and absence of the known antibiotic is determined. If the IC₅₀s in the presence and absence of the known drug are substantially similar, then the test drug and the known drug act on different pathways. If the IC₅₀s are substantially different, then the test drug and the known drug act on the same pathway.

[0322] Similar methods may be performed using known antibiotics which act on a gene product homologous to the Candida albicans sequences described herein. The homolgous gene product may be from animal fugal pathogens such as Aspergillus fumigatus, Aspergillus niger, Aspergillus flavis, Candida tropicalis, Candida parapsilopsis, Candida krusei, Cryptococcus neoformans, Coccidioides immitis, Exophalia dermatiditis, Fusarium oxysporum, Histoplasma capsulatum, Pneumocystis carinii, Trichosporon beigelii, Rhizopus arrhizus, Mucor rouxii, Rhizomucor pusillus, or Absidia corymbigera, or the plant fungal pathogens, such as Botrytis cinerea, Erysiphe gram in is, Magnaporthe grisea, Puccinia recodita, Septoria triticii, Tilletia controversa, Ustilago maydis, or any species falling within the genera of any of the above species. In some embodiments, the gene products are from an organism other than Saccharomyces cerevisae.

[0323] Another embodiment of the present invention is a method for identifying a candidate compound for use as an antibiotic in which the activity of target proteins or nucleic acids involved in pathways required for fungal proliferation, virulence or pathogenicity is reduced by contacting cells with a sub-lethal concentration of a known antibiotic which acts against the target protein or nucleic acid. The method is similar to those described above for identifying candidate compounds for use as antibiotics except that rather than reducing the activity or level of a gene product required for proliferation, virulence or pathogenicity using GRACE strains which express a rate limiting level of the gene product, the activity or level of the gene product is reduced using a sub-lethal level of a known antibiotic which acts against the proliferation required gene product.

[0324] The growth inhibition from the sub-lethal concentration of the known antibiotic may be at least about 5%, at least about 8%, at least about 10%, at least about 20%, at least about 30%, at least about 40%, at least about 50%, at least about 60%, or at least about 75%, or more.

[0325] Alternatively, the sub-lethal concentration of the known antibiotic may be determined by measuring the activity of the target proliferation-required gene product rather than by measuring growth inhibition.

[0326] In order to characterize test compounds of interest, cells are contacted with a panel of known antibiotics at a sub-lethal level and one or more concentrations of the test compound. As a control, the cells are contacted with the same concentrations of the test compound alone. The IC₅₀ of the test compound in the presence and absence of the known antibiotic is determined. If the IC₅₀ of the test compound is substantially different in the presence and absence of the known drug then the test compound is a good candidate for use as an antibiotic. As discussed above, once a candidate compound is identified using the above methods its structure may be optimized using standard techniques such as combinatorial chemistry.

[0327] Similar methods may be performed using known antibiotics which act on a gene product homologous to the Candida albicans sequences described herein. The homolgous gene product may be from animal fugal pathogens such as Aspergillus fumigatus, Aspergillus niger, Aspergillus flavis, Candida tropicalis, Candida parapsilopsis, Candida krusei, Cryptococcus neoformans, Coccidioides immitis, Exophalia dermatiditis, Fusarium oxysporum, Histoplasma capsulatum, Pneumocystis carinii, Trichosporon beigelii, Rhizopus arrhizus, Mucor rouxii, Rhizomucor pusillus, or Absidia corymbigera, or the plant fungal pathogens, such as Botrytis cinerea, Erysiphe graminis, Magnaporthe grisea, Puccinia recodita, Septoria triticii, Tilletia controversa, Ustilago maydis, or any species falling within the genera of any of the above species. In some embodiments, the gene products are from an organism other than Saccharomyces cerevisae.

[0328] An exemplary target gene product is encoded by CaTBF1. A number of features make this C. albicans gene product a valuable drug target. First, the protein encoded by CaTBF1 is compatible with in vitro high throughput screening of compounds that inhibit its activity. Modulated expression of this gene product in whole cell assays could be performed in parallel with in vitro assays to broaden the spectrum of possible inhibitory compounds identified. In addition, demonstration of the predicted physical interaction between CaTbf1p and chromosomal telomerases could be used to develop two-hybrid assays for drug screening purposes. Finally, because CaTBF1 is a fungal specific gene, its nucleotide sequence could serve in designing PCR-based diagnostic tools for fungal infection.

[0329] Other validated drug targets included in the GRACE-derived strain collection that represent preferred drug targets include the products encoded by the following C. albicans genes: CaRHO1, CaERG8, CaAUR1, and CaCHO1, as well as those encoded by SEQ ID NOs.:6001-6310. The ability to manipulate these genes using GRACE methods of the present invention will improve drug screening practices now in use that are designed to identify inhibitors of these critical gene products.

[0330] In another embodiment of the present invention, all potential drug targets of a pathogen could be screened simultaneously against a library of compounds using, for example a 96 well microtiter plate format, where growth, measured by optical density or pellet size after centrifugation, may be determined for each well. A genomic approach to drug screening eliminates reliance upon potentially arbitrary and artificial criteria used in evaluating which target to screen and instead allows all potential targets to be screened. This approach not only offers the possibility of identifying specific compounds which inhibit a preferred process (e.g. cell wall biosynthetic gene products) but also the possibility of identifying all fungicidal compounds within that library and linking them to their cognate cellular targets.

[0331] In still another embodiment of the present invention, GRACE strains could be screened to identify synthetic lethal mutations, and thereby uncover a potentially novel class of drug targets of significant therapeutic value. For example two separate genes may encode homologous proteins that participate in a common and essential cellular function, where the essential nature of this function will only become apparent upon inactivation of both family members. Accordingly, examination of the null phenotype of each gene separately would not reveal the essential nature of the combined gene products, and consequently, this potential drug target would not be identified. Provided the gene products are highly homologous to one another, compounds found to inhibit one family member are likely to inhibit the other and are therefore predicted to approximate the synthetic growth inhibition demonstrated genetically. In other cases however, synthetic lethality may uncover seemingly unrelated (and often nonessential) processes, which when combined produce a synergistic growth impairment (cell death). For example, although disruption of the S. cerevisiae gene RVS161 does not present any discernable vegetative growth phenotype in yeast carrying this single mutation, at least 9 other genes are known to display a synthetic lethal effect when combined with inactivation of RVS161. These genes participate in processes ranging from cytoskeletal assembly and endocytosis, to signal transduction and lipid metabolism and identifies multiple avenues to pursuing a combination drug target strategy. A directed approach to uncovering synthetic lethal interactions with essential and nonessential drug targets is now performed where a GRACE strain or heterozygote strain is identified as displaying an enhanced sensitivity to the tested compound, not because it expresses a reduced level of activity for the drug target, but because its mutation is synthetically lethal in combination with inhibition of a second drug target. Discerning whether the compound specifically inhibits the drug target in the sensitized GRACE strain or heterozygote strain or a second target may be achieved by screening the entire GRACE or heterozygote strain sets for additional mutant strains displaying equal or greater sensitivity to the compound, followed by genetic characterization of a double mutant strain demonstrating synthetic lethality between the two mutations.

### 5.5.2.2 Screening for Non-antifungal Therapeutic Agents With GRACE Strains

[0332] The biochemical similarity existing between pathogenic fungi and the mammalian hosts they infect limits the range of clinically useful antimycotic compounds. However, this similarity can be exploited using a GRACE strain collection to facilitate the discovery of therapeutics that are not used as antimycotics, but are useful for treatment a wide-range of diseases, such as cancer, inflammation, etc.

[0333] In this embodiment of the invention, fungal genes that are homologous to disease-causing genes in an animal or plant, are selected and GRACE strains of this set of genes are used for identification of compounds that display potent and specific bioactivity towards the products of these genes, and therefore have potential medicinal value for the treatment of diseases. Essential and non-essential genes and the corresponding GRACE strains carrying modified allelic pairs of such genes are useful in this embodiment of the invention. It has been predicted that as many as 40% of the genes found within the C. albicans genome share human functional homologs. It has also been predicted that as many as 1% of human genes are involved in human diseases and therefore may serve as potential drug targets. Accordingly, many genes within the GRACE strain collection are homologs to disease-causing human genes and compounds that specifically inactivate individual members of this gene set may in fact have alternative therapeutic value. The invention provides a pluralities of GRACE strains in which the modified alleles are fungal genes that share sequence, structural and/or functional similarities to genes that are associated with one or more diseases of the animal or plant.

[0334] For example, much of the signal transduction machinery that promotes cell cycle progression and is often perturbed in a variety of cancers is conserved in fungi. Many of these genes encode for cyclins, cyclin-dependent kinases (CDK), CDK inhibitors, phosphatases, and transcription factors that are both structurally and functionally related. As a result, compounds found to display specificity towards any of these functional classes of proteins could be evaluated by secondary screens to test for potential anticancer activity. However, cytotoxic compounds identified in this way need not act on cancer causing targets to display therapeutic potential. For example the taxol family of anti-cancer compounds, which hold promise as therapeutics for breast and ovarian cancers, bind tubulin and promote microtubule assembly, thereby disrupting normal microtubule dynamics. Yeast tubulin displays similar sensitivity to taxol, suggesting that additional compounds affecting other fundamental cellular processes shared between yeast and man could similarly be identified and assessed for antitumor activity.

[0335] The phenomenon of pathogenesis extends far beyond the taxonomic borders of microbes and ultimately reflects the underlying physiology. In many ways, the phenomenon of cancer is analogous to the process of pathogenesis by an opportunistic pathogen such as C. albicans. Both are non-infectious diseases caused by either the body's own cells, or microbes from its natural fauna. These cells grow in a manner unchecked by the immune system and in both cases disease manifests itself by colonization of vital organs and eventual tissue damage resulting in death. Effective drug-based treatment is also elusive for both diseases primarily because the causative agent in both cases is highly related to the host.

[0336] In fact, a number of successful therapeutic drugs affecting processes unrelated to cancer have also been discovered through anti-fungal drug screening programs. One clinically-important class of compounds includes the immunosuppressant molecules rapamycin, cyclosporin A, and FK506, which inhibit conserved signal transduction components. Cyclosporin A and FK506, form distinct drug-prolyl isomerase complexes (CyPA—Cyclosporin A and FKBP12-FK506 respectively) which bind and inactivate the regulatory subunit of the calcium and calmodulin-dependent phosphatase, calcineurin. Rapamycin also complexes with FKBP12, but this drug-protein complex also binds to the TOR family of phosphatidylinositol kinases to inhibit translation and cell cycle progression. In each case, both the mechanism of drug action, and the drug targets themselves are highly conserved from yeast to humans.

[0337] The identification of C. albicans drug targets, and grouping the targets into essential-gene, fungal-specific, and pathogen-specific target sets provide the basis for the development of whole-cell screens for compounds that interact with and inhibit individual members of any of these targets. Therefore, similar analyses can be used to identify other sets of GRACE strains having modified allelic pairs of genes encoding drug targets with other specific common functions or attributes. For example, GRACE strain subsets can be established which comprise gene targets that are highly homologous to human genes, or gene targets that display a common biochemical function, enzymatic activity, or that are involved in carbon compound catabolism, biosynthesis, transport of molecules (transporter activity), cellular localization, signal transduction cascades, cell cycle control, cell adhesion, transcription, translation, DNA replication, etc. An exemplary list of biochemical functions is provided in Section 5.4.3.

### 5.5.2.3 Target Gene Dosage-Based Whole Cell Assays

[0338] Experiments involving modulating the expression levels of the encoding gene to reveal phenotypes from which gene function may be inferred can be carried out in a pathogenic diploid fungus, such as Candida albicans, using the strains and methods of the present intention. The principle of drug-target-level variation in drug screening involves modulating the expression level of a drug target to identify specific drug resistance or drug sensitivity phenotypes, thereby linking a drug target to a particular compound. Often, these phenotypes are indicative of the target gene encoding the bona fide drug target of this compound. In examples where this is not the case, the candidate target gene may nonetheless provide important insight into the true target gene that is functioning either in a pathway or process related to that inhibited by the compound (e.g. producing synthetic phenotype), or instead functioning as a drug resistance mechanism associated with the identified compound.

[0339] Variation of the expression levels of the target protein is also incorporated within both drug screening and drug target identification procedures. The total, cellular expression level of a gene product in a diploid organism is modified by disrupting one allele of the gene encoding that product, thereby reducing its functional activity in half, creating a “haploinsufficient” phenotype. A heterozygous S. cerevisiae strain collection has been used in such a haploinsufficiency screen to link drug-based resistance and hypersensitive phenotypes to heterozygous drug targets. Nonessential genes are screened directly using a haploid deletion strain collection against a compound library for specific phenotypes or “chemotypes.” However, this procedure cannot be used in a haploid organism where the target gene is an essential one.

[0340] The expression level of a given gene product is also elevated by cloning the gene into a plasmid vector that is maintained at multiple copies in the cell. Overexpression of the encoding gene is also achieved by fusing the corresponding open reading frame of the gene product to a more powerful promoter carried on a multicopy plasmid. Using these strategies, a number of overexpression screens have been successfully employed in S. cerevisiae to discover novel compounds that interact with characterized drug targets as well as to identify the protein targets bound by existing therapeutic compounds.

[0341] The GRACE strain collection replaces the surrogate use of S. cerevisiae in whole cell drug screening by providing a dramatic range in gene expression levels for drug targets directly within the pathogen (FIG. 5). In one embodiment of the invention, this is achieved using the C. albicans-adapted tetracycline promoter system to construct GRACE strains. Northern Blot analysis of 30 different GRACE strains grown under nonrepressing conditions (i.e. no tetracycline) reveals that 83% of conditionally expressed genes tested maintain an overexpression level greater than or equal to 3 fold of wild type, and 60% of all genes examined express greater than or equal to 5 times that of the wild type C. albicans strain used for GRACE strain construction. As each GRACE strain is in fact heterozygous, this expression range is presumably doubled if compared against their respective heterozygote strain. For most GRACE strains then, this represents an elevated expression level rivaling that typically achieved in S. cerevisiae using standard 2′-based multicopy plasmids, and an absolute level of constitutive expression comparable to that provided by the CaACT1 promoter. Therefore, the GRACE strain collections of the invention are not only useful in target validation under repressing conditions, but are also useful as a collection of strains overexpressing these same validated drug targets under nonrepressing conditions for whole cell assay development and drug screening.

[0342] Variation in the level of expression of a target gene product in a GRACE strain is also used to explore resistance to antimycotic compounds. Resistance to existing antifungal therapeutic agents reflects both the limited number of antifungal drugs available and the alarming dependence and reliance clinicians have in prescribing them. For example, dependence on azole-based compounds such as fluconazole for the treatment of fungal infections, has dramatically undermined the clinical therapeutic value for this compound. The GRACE strain collection is used to combat fluconazole resistance by identifying gene products that interact with the cellular target of fluconazole. Such products are used to identify drug targets which, when inactivated in concert with fluconazole, provide a synergistic effect and thereby overcome resistance to fluconazole seen when this compound is used alone. This is accomplished, for example, by using the GRACE strain collection to overexpress genes that enhance drug resistance. Such genes include novel or known plasma membrane exporters including ATP-binding cassette (ABC) transporters and multidrug resistance (MDR) efflux pumps, pleiotropic drug resistance (PDR) transcription factors, and protein kinases and phosphatases. Alternatively, genes specifically displaying a differential drug sensitivity are identified by screening GRACE strains expressing reduced levels (either by haploinsufficiency or threshold expression via the tetracycline promoter) individual members of the target set. Identifying such genes provides important clues to drug resistance mechanisms that could be targeted for drug-based inactivation to enhance the efficacy of existing antifungal therapeutics.

[0343] In another aspect of the present invention, overexpression of the target gene for whole cell assay purposes is supported with promoters other than the tetracycline promoter system. (see Section 5.3.1) For example, the CaPGK1 promoter is used to overexpress C. albicans drug targets genes. In S. cerevisiae, the PGK1 promoter is known to provide strong constitutive expression in the presence of glucose. See, Guthrie, C., and G. R. Fink. 1991. Guide to yeast genetics and molecular biology. Methods Enzymol. 194:373-398. A preliminary analysis of five C. albicans genes placed under the control of the CaPGK1 promoter (CaKRE9, CaERG11, CaALG7, CaTUB1 and CaAUR1) revealed dramatic overexpression versus wild type as judged by Northern blot analysis. The level of overexpression achieved for all genes exceeds that obtained by the tetracycline promoter by 3-4 fold. Moreover, CaAUR1, which was not overexpressed significantly when constitutively expressed using the tetracycline promoter, was overexpressed 5-fold relative to wild type CaAUR1 expression levels, suggesting that the CaPGK1 promoter is useful in overexpressing genes normally not overexpressed by the tetracycline promoter.

[0344] In another aspect of the present invention, intermediate expression levels of individual drug targets within the GRACE strain collection may are engineered to provide strains tailored for the development of unique whole cell assays. In this embodiment of the invention, GRACE strains are grown in a medium containing a tetracycline concentration determined to provide only a partial repression of transcription. Under these conditions, it is possible to maintain an expression level between that of the constitutively expressed overproducing strain and that of wild type strain, as well as levels of expression lower than that of the wild-type strain. That is, it is possible to titrate the level of expression to the minimum required for cell viability. By repressing gene expression to this critical state, novel phenotypes, resembling those produced by a partial loss of function mutation (i.e. phenocopies of hypomorphic mutants) may be produced and offer additional target expression levels applicable for whole cell assay development and drug screening. Repressing expression of the remaining allele of an essential gene to the threshold level required for viability, therefore will provide a strain with enhanced sensitivity toward compounds active against this essential gene product.

[0345] In order to demonstrate the utility of target level expression in whole cell assays for drug screening, both a CaHIS3 heterozygote strain and a tetracycline promoter-regulated CaHIS3 GRACE strain were compared against a wild type (diploid) CaHIS3 strain for sensitivity towards the 3-aminotriazole (3-AT) (Example 6.3). The data derived from these experiments clearly indicate that distinct levels of target gene products synthesized within the pathogen could be directly applied in whole cell assay based drug screens to identify novel antifungal compounds active against novel drug targets validated using the GRACE method.

### 5.5.2.4 Uses of Tagged Strains

[0346] In still another aspect of the present invention, unique oligonucleotide sequence tags or “bar codes” are incorporated into individual mutant strains included within a heterozygous strain collection of validated targets. The presence of these sequence tags enables an alternative whole cell assay approach to drug screening. Multiple target strains may be screened simultaneously in a mixed population (rather than separately) to identify phenotypes between a particular drug target and its inhibitory agent.

[0347] Large-scale parallel analyses are performed using mixed populations of the entire bar coded heterozygous essential strain collection target set and comparing the relative representation of individual strains within a mixed population prior to and after growth in the presence of a compound. Drug-dependent depletion or overrepresentation of a unique bar-coded strain is determined by PCR-amplifying and fluorescently labeling all bar codes within the mixed population and hybridizing the resulting PCR products to an array of complementary oligonucleotides. Differential representation between bar coded strains indicates gene-specific hypersensitivity or resistance and suggests the corresponding gene product may represent the molecular target of the compound tested.

[0348] In one specific embodiment, the mutant strains are GRACE strains, and each of the GRACE strains of the set comprises at least one, and preferably two unique molecular tags, which, generally, are incorporated within the cassette used to replace the first allele of the gene pair to be modified. Each molecular tag is flanked by primer sequences which are common to all members of the set being tested. Growth is carried out in repressive and non-repressive media, in the presence and absence of the compound to be tested. The relative growth of each strain is assessed by carrying out simultaneous PCR amplification of the entire collection of embedded sequence tags.

[0349] In one non-limiting aspect of the present invention, the PCR amplification is performed in an asymmetric manner with fluorescent primers and the resulting single stranded nucleic acid product hybridized to an oligonucleotide array fixed to a surface and comprises the entire corresponding set of complementary sequences. Analysis of the level of each fluorescent molecular tag sequence is then determined to estimate the relative amount of growth of GRACE strain of the set, in those media, in the presence and absence of the compound tested.

[0350] Therefore, for each GRACE strain of the set tested, there could be, in one non-limiting example of this method, four values for the level of the corresponding molecular tag found within the surviving population. They would correspond to cell growth under repressing and non-repressing conditions, both in the presence and absence of the compound being tested. Comparison of growth in the presence and absence of the test compound provides a value or “indicator” for each set of growth media; that is, an indicator derived under repressing and non-repressing conditions. Again, comparison of the two indicator values will reveal if the test compound is active against the gene product expressed by the modified allelic gene pair carried by that specific member of the GRACE set tested.

[0351] In still another aspect of the present invention, each potential drug target gene in a heterozygous tagged or bar-coded collection, may be overexpressed. For example, in the heterozygous tagged or bar-coded collection described above, each of the potential target gene can be overexpressed by introducing either the Tet promoter or another strong, constitutively expressed promoter (e.g. CaACT1, CaADH1 and CaPGK1) upstream of the remaining non-disrupted allele. These constructions allow a further increase in the dosage of the encoded target gene product of individual essential genes to be used in mixed-population drug susceptibility studies. Although overexpression may itself disrupt the normal growth rate of numerous members of the population, reliable comparisons could still be made between mock and drug-treated mixed cultures to identify compound-specific growth differences.

[0352] In S. cerevisiae, the molecular drug targets of several well-characterized compounds including 3-amino-triazol, benomyl, tunicamycin and fluconazole were identified by a similar approach. In that study, bar-coded strains bearing heterozygous mutations in HIS3, TUB 1, ALG7, and ERG 11, (i.e. the respective drug targets to the compounds listed above) displayed significantly greater sensitivity when challenged with their respective compound than other heterozygote bar-coded strains when grown together in a mixed population.

[0353] In another aspect of the present invention, screens for antifungal compounds can be carried out using complex mixtures of compounds that comprise at least one compound active against the target strain. Tagging or bar-coding the GRACE strain collection facilitates a number of large scale analyses necessary to identify gene sets as well as evaluate and ultimately evaluate individual targets within particular gene sets. For example, mixed-population drug screening using a bar-coded GRACE strain collection effectively functions as a comprehensive whole cell assay. Minimal amounts of a complex compound library are sufficient to identify compounds that act on individual essential target genes within the collection. This is done without the need to array the collection. Also, strong predictions as to the ‘richness’ of any particular compound library could be made before committing to it in drug screening. It becomes possible then to assess whether, for example, a carbohydrate-based chemical library possesses greater fungicidal activity than a natural product or synthetic compound library. Particularly potent compounds within any complex library of molecules can be immediately identified and evaluated according to the priority of targets and assays available for drug screening. Alternatively, the invention provides applying this information to developing “tailored” screens, in which only those targets which were demonstrated to be inactivated in mixed population experiments by a particular compound library would be included in subsequent array-formatted screens.

[0354] Traditionally, drug discovery programs have relied on an individual or a limited set of validated drug targets. The preceding examples emphasize that such an approach is no longer necessary and that high throughput target evaluation and drug screening are now possible. However, a directed approach based on selecting individual targets may still be preferred depending on the expertise, interest, strategy, or budget of a drug discovery program.

### 5.5.3 Target Evaluation in an Animal Model System.

[0355] Currently, validation of an essential drug target is demonstrated by examining the effect of gene inactivation under standard laboratory conditions. Putative drug target genes deemed nonessential under standard laboratory conditions may be examined within an animal model, for example, by testing the pathogenicity of a strain homozygous for a deletion in the target gene versus wild type. However, essential drug targets are precluded from animal model studies. Therefore, the most desirable drug targets are omitted from the most pertinent conditions to their target evaluation.

[0356] In one specific embodiment of the invention, conditional expression, provided by the GRACE essential strain collection, overcomes this longstanding limitation to target validation within a host environment. Animal studies can be performed using mice inoculated with GRACE essential strains and examining the effect of gene inactivation by conditional expression. In a preferred embodiment of the invention, the effect on mice injected with a lethal inoculum of a GRACE essential strain could be determined depending on whether the mice were provided with an appropriate concentration of tetracycline to inactivate expression of a drug target gene. The lack of expression of a gene demonstrated to be essential under laboratory conditions can thus be correlated with prevention of a terminal C. albicans infection. In this type of experiment, only mice “treated” with tetracycline-supplemented water, are predicted to survive infection because inactivation of the target gene has killed the GRACE strain pathogen within the host.

[0357] In yet another embodiment of the invention, conditional expression could be achieved using a temperature-responsive promoter to regulate expression of the target gene or a temperature sensitive allele of a particular drug target, such that the gene is functional at 30° C. but inactivated within the normal body temperature of the mouse.

[0358] In the same manner as described above for essential genes, it is equally feasible to demonstrate whether nonessential genes comprising the GRACE strain collection are required for pathogenicity in a mouse model system. Included in this set are multiple genes whose null phenotype results in a reduced growth rate and may attenuate the virulence of the pathogen. Many mutants demonstrating a slow growth phenotype may represent hypomorphic mutations in otherwise essential genes (as demonstrated by alternative methods) which are simply not completely inactivated by the conditional expression method used to construct the GRACE strain. One important use of such strains is to assess whether any given essential gene doubly functions in the process of virulence. Essential genes that display substantially reduced virulence and growth rate when only partially inactivated represent “multifactorial” drug targets for which even minimally inhibitory high specificity compounds would display therapeutic value. Collectively, all GRACE strains that fail to cause fungal infection in mice under conditions of gene inactivation by tetracycline (or alternative gene inactivation means) define a subset of genes that are required for pathogenicity, i.e., GRACE pathogenicity subset. More defined subsets of pathogenicity genes, for example those genes required for particular steps in pathogenesis (e.g. adherence or invasion) may be determined by applying the GRACE pathogenicity subset of strains to in vitro assays which measure the corresponding process. For example, examining GRACE pathogenicity strains in a buccal adhesion or macrophage assay by conditional expression of individual genes would identify those pathogenicity factors required for adherence or cell invasion respectively.

[0359] The GRACE strain collection or a desired subset thereof is also well suited for evaluating acquired resistance/suppression or distinguishing between fungicidal/fungistatic phenotypes for an inactivated drug target within an animal model system. In this embodiment of the invention, GRACE strains repressed for expression of different essential drug target genes would be inoculated into mice raised on tetracycline-supplemented water. Each of the GRACE strains would then be compared according to the frequency of death associated with the different mice populations they infected. It is expected that the majority of infected mice will remain healthy due to fungal cell death caused by tetracycline-dependent inactivation of the essential gene in the GRACE strain. However, a GRACE strain harboring a drug target more likely to develop extragenic suppressors because it is a fungistatic target rather than fungicidal one, or suppressed by an alternative physiological process active within a host environment, can be identified by the higher incidence of lethal infections detected in mice infected with this particular strain. By this method, it is possible to evaluate/rank the likelihood that individual drug target genes may develop resistance within the host environment.

[0360] Although a GRACE strain is highly suited for this purpose, it is also contemplated that a strain with a modified allele of an essential gene or a modified essential gene is used in an animal model for drug target evaluation.

### 5.5.4 Rational Design of Binding Compounds

[0361] Compounds identified via assays such as those described herein can be useful, for example, for inhibiting the growth of the infectious agent and/or ameliorating the symptoms of an infection. Compounds can include, but are not limited to, other cellular proteins. Binding compounds can also include, but are not limited to, peptides such as, for example, soluble peptides, comprising, for example, extracellular portions of target gene product transmembrane receptors, and members of random peptide libraries (see, e.g., Lam et al., 1991, Nature 354:82-84; Houghten et al., 1991, Nature 354:84-86) made of D- and/or L-configuration amino acids, rationally-designed antipeptide peptides, (see e.g., Hurby et al., Application of Synthetic Peptides: Antisense Peptides,” In Synthetic Peptides, A User's Guide, W. H. Freeman, NY (1992), pp. 289-307), antibodies (including, but not limited to polyclonal, monoclonal, human, humanized, anti-idiotypic, chimeric or single chain antibodies, and FAb, F(ab′)₂ and FAb expression library fragments, and epitope-binding fragments thereof), and small organic or inorganic molecules. In the case of receptor-type target molecules, such compounds can include organic molecules (e.g., peptidomimetics) that bind to the ECD and either mimic the activity triggered by the natural ligand (i.e., agonists); as well as peptides, antibodies or fragments thereof, and other organic compounds that mimic the ECD (or a portion thereof) and bind to a “neutralize” natural ligand.

[0362] Computer modeling and searching technologies permit identification of compounds, or the improvement of already identified compounds, that can modulate target gene expression or activity. Having identified such a compound or composition, the active sites or regions are preferably identified. In the case of compounds affecting receptor molecules, such active sites might typically be ligand binding sites, such as the interaction domains of ligand with receptor itself. The active site is identified using methods known in the art including, for example, from the amino acid sequences of peptides, from the nucleotide sequences of nucleic acids, or from study of complexes of the relevant compound or composition with its natural ligand. In the latter case, chemical or X-ray crystallographic methods are used to find the active site by finding where on the factor the complexed ligand is found.

[0363] The three-dimensional geometric structure of the active site is then preferably determined. This is done by known methods, including X-ray crystallography, which determines a complete molecular structure. Solid or liquid phase NMR is also used to determine certain intra-molecular distances within the active site and/or in the ligand binding complex. Other experimental methods of structure determination known to those of skill in the art, are also used to obtain partial or complete geometric structures. The geometric structures are measured with a complexed ligand, natural or artificial, which increases the accuracy of the active site structure determined. Methods of computer based numerical modeling are used to complete the structure (e.g., in embodiments wherein an incomplete or insufficiently accurate structure is determined) or to improve its accuracy.

[0364] Finally, having determined the structure of the active site, either experimentally, by modeling, or by a combination, candidate modulating compounds are identified by searching databases containing compounds along with information on their molecular structure. Such a search seeks compounds having structures that match the determined active site structure and that interact with the groups defining the active site. Such a search can be manual, but is preferably computer assisted. These compounds found from this search are potential target or pathway gene product modulating compounds.

[0365] Alternatively, these methods are used to identify improved modulating compounds from an already known modulating compound or ligand. The composition of the known compound is modified and the structural effects of modification are determined using the experimental and computer modeling methods described above applied to the new composition. The altered structure is then compared to the active site structure of the compound to determine if an improved fit or interaction results. In this manner systematic variations in composition, such as by varying side groups, are quickly evaluated to obtain modified modulating compounds or ligands of improved specificity or activity.

[0366] Further experimental and computer modeling methods useful to identify modulating compounds based upon identification of the active sites of target or pathway gene or gene products and related transduction and transcription factors are apparent to those of skill in the art.

[0367] There are a number of articles that review the art of computer modeling of drugs that interact with specific proteins, including the following: Rotivinen et al., 1988, Acta Pharmaceutical Fennica 97:159-166; Ripka, (Jun. 16, 1988), New Scientist 54-57; McKinaly and Rossmann, 1989, Annu. Rev. Pharmacol. Toxiciol. 29:111-122; Perry and Davies, OSAR: Quantitative Structure-Activity Relationships in Drug Design pp. 189-193 (Alan R. Liss, Inc. 1989); Lewis and Dean, 1989 Proc. R. Soc. Lond. 236:125-140 and 1-162; and, with respect to a model receptor for nucleic acid components, Askew et al., 1989, J. Am. Chem. Soc. 111:1082-1090.

[0368] Although generally described above with reference to design and generation of compounds which could alter binding, one could also screen libraries of known compounds, including natural products or synthetic chemicals, as well as other biologically active materials, including proteins, for compounds which are inhibitors or activators.

### 5.6 Transcriptional Profiling

### 5.6.1 Analysis of Gene Expression

[0369] Gene expression profiling techniques are important tools for the identification of suitable biochemical targets, as well as for the determination of the mode of action of known compounds. Completion of the C. albicans genome sequence and development of nucleic acid arrays or microarrays incorporating this information, will enable genome-wide gene expression analyses to be carried out with this diploid pathogenic fungus. Technologies available for making and using very large arrays of nucleic acids are well known in the art, see, for example, Schena, M., “Microarray Biochip Technology,” 2000, Eaton Publishing, MA, in particular Chapters 1 and 2, and also U.S. Pat. No. 5,143,854 and PCT Publication Nos. WO 90/15070 and 92/10092, each of which is hereby incorporated by reference. See, also, U.S. Pat. Nos. 5,412,087, 5,445,934 and 5,744,305; Grigorenko, “DNA Arrays: Technologies and Experimental Strategies”, CRC Press, 2001; and Rampal, “DNA Arrays: Methods and Protocols”, Humana Press 2001, each of which is hereby incorporated by reference. In particular embodiments, the nucleic acid arrays used for profiling can comprise one or more of the nucleic acid molecules of the essential genes of the invention, preferably DNA comprising the entire or a portion of SEQ ID NO. 6001-6310, or DNA comprising a nucleotide sequence that encode the entire or a portion of SEQ ID NO: 7001-7310. The present invention provides methods for obtaining the transcriptional response profiles for both essential and virulence/pathogenicity genes of Candida albicans. Conditional expression of essential genes serves to delineate, for example, regulatory interactions valuable for the design of drug screening programs focused upon C. albicans.

[0370] In an embodiment of the present invention, a strain or a strain collection wherein the expression of an essential gene identified by the method of the invention is modified can be used for the analysis of expression of essential genes within this pathogen. In one specific embodiment, a GRACE strain collection is used. One particularly powerful application of such a strain collection involves the construction of a comprehensive transcriptional profile database for the entire essential gene set or a desired subset of essential genes within a pathogen. Such a database is used to compare the response profile characteristic of lead antimycotic compounds with the profile obtained with new anti-fungal compounds to distinguish those with similar from those with distinct modes of action. Matching (or even partially overlapping) the transcriptional response profiles determined after treatment of the strain with the lead compound with that obtained with a particular essential target gene under repressing conditions, is used to identity the target and possible mode of action of the drug. See, for example, U.S. Pat. No. 6,004,755 which disclose methods for quantitative gene expression analysis with nucleic acid arrays; and U.S. Pat. No. 6,263,287 which discloses methods and computer systems for the analysis and manipulation of gene expression data, which are incorporated herein by reference in their entirety.

[0371] Gene expression analysis of essential genes also permits the biological function and regulation of those genes to be examined within the pathogen, and this information is incorporated within a drug screening program. For example, transcriptional profiling of essential drug targets in C. albicans permits the identification of novel drug targets which participate in the same cellular process or pathway uncovered for the existing drug target and which could not otherwise be identified without direct experimentation within the pathogen. These include genes not only unique to the pathogen but also broad-range gene classes possessing a distinct function or subject to different regulation in the pathogen. Furthermore, pathogen-specific pathways may be uncovered and exploited for the first time. See, for example, U.S. Pat. No. 6,340,565 (which is incorporated herein by reference in their entirety), which discloses an gene expression array-based approach to the systematic analysis of relationships between expression patterns of genes as affected by the activities of other genes, which can be adapted to investigate the effect of pathogen gene expression in the presence of various compounds identified by the methods of the invention.

[0372] In another aspect of the present invention, the gene expression profile of mutant strains, such as GRACE-derived strains, under nonrepressing or induced conditions is established to evaluate the overexpression response profile for one or more drug targets. For example, overexpression of genes functioning in signal transduction pathways often display unregulated activation of the pathway under such conditions. Moreover, several signaling pathways have been demonstrated to function in the pathogenesis process. Transcriptional response profiles generated by overexpressing C. albicans GRACE strains provide information concerning the set of genes regulated by such pathways; any of which may potentially serve an essential role in pathogenesis and therefore representing promising drug targets. Furthermore, analysis of the expression profile may reveal one or more genes whose expression is critical to the subsequent expression of an entire regulatory cascade. Accordingly, these genes are particularly important targets for drug discovery and mutants carrying the corresponding modified allelic pair of genes form the basis of a mechanism-of-action based screening assays. Presently such an approach is not possible. Current drug discovery practices result in an exceedingly large number of “candidate” compounds and little understanding of their mode of action. A transcriptional response database comprising both gene shut-off and overexpression profiles generated using the GRACE strain collection offers a solution to this drug discovery bottleneck by 1) determining the transcriptional response or profile resulting from an antifungal's inhibition of a wild type strain, and 2) comparing this response to the transcriptional profiles resulting from inactivation or overexpression of drug targets comprising the GRACE strain collection.

[0373] Matching or significantly correlating transcriptional profiles resulting from both genetic alteration of a drug target and chemical/compound inhibition of wild type cells provides evidence linking the compound to its cellular drug target and suggests its mechanism of action.

[0374] Accordingly, the invention provides a method for evaluating a compound against a target gene product encoded by a nucleotide sequence comprising one of SEQ ID NO: 6001 through to 6310, said method comprising the steps of (a) contacting wild type diploid fungal cells or control cells with the compound and generating a first transcription profile; (b) determining the transcription profile of mutant diploid fungal cells, such as a GRACE strain, which have been cultured under conditions wherein the second allele of the target gene is substantially underexpressed, not expressed or overexpressed and generating a second transcription profile for the cultured cells; and comparing the first transcription profile with the second transcription profile to identify similarities in the profiles. For comparisons, similarities of profiles can be expressed as an indicator value; and the higher the indicator value, the more desirable is the compound.

### 5.6.2 Identification of Secondary Targets

[0375] Methods are described herein for the identification of secondary targets. “Secondary target,” as used herein, refers to a gene whose gene product exhibits the ability to interact with target gene products involved in the growth and/or survival of an organism (i.e., target essential gene products), under a set of defined conditions, or in the pathogenic mechanism of the organism, (i.e., target virulence gene products) during infection of a host.

[0376] Any method suitable for detecting protein-protein interactions can be employed for identifying secondary target gene products by identifying interactions between gene products and target gene products. Such known gene products can be cellular or extracellular proteins. Those gene products which interact with such known gene products represent secondary target gene products and the genes which encode them represent secondary targets. Well known techniques such as those described in Golemis and Serebriiskii, “Protein-protein interactions: A molecular cloning manual”, Cold Spring Harbor Laboratory Press, 2002, which is incorporated herein by reference, can be used.

[0377] Among the traditional methods employed are co-immunoprecipitation, crosslinking and co-purification through gradients or chromatographic columns. Utilizing procedures such as these allows for the identification of secondary target gene products. Once identified, a secondary target gene product is used, in conjunction with standard techniques, to identify its corresponding secondary target. For example, at least a portion of the amino acid sequence of the secondary target gene product is ascertained using techniques well known to those of skill in the art, such as via the Edman degradation technique (see, e.g., Creighton, 1983, “Proteins: Structures and Molecular Principles,” W. H. Freeman & Co., N.Y., pp.34-49). The amino acid sequence obtained can be used as a guide for the generation of oligonucleotide mixtures that can be used to screen for secondary target gene sequences. Screening can be accomplished, for example, by standard hybridization or PCR techniques. Techniques for the generation of oligonucleotide mixtures and for screening are well-known. (See, e.g., Ausubel, supra., and PCR Protocols: A Guide to Methods and Applications, 1990, Innis, M. et al., eds. Academic Press, Inc., New York).

[0378] Additionally, methods are employed which result in the simultaneous identification of secondary targets which encode proteins interacting with a protein involved in the growth and/or survival of an organism under a set of defined conditions, or in the pathogenic mechanism of the organism during infection of a host. These methods include, for example, probing expression libraries with labeled primary target gene protein known or suggested to be involved in or critical to these mechanisms, using this protein in a manner similar to the well known technique of antibody probing of λgt11 phage libraries.

[0379] One method which detects protein interactions in vivo, the two-hybrid system, is described in detail for illustration purposes only and not by way of limitation. One version of this system has been described (Chien et al., 1991, Proc. Natl. Acad. Sci. USA, 88:9578-9582) and is commercially available from Clontech (Palo Alto, Calif.).

[0380] Briefly, utilizing such a system, plasmids are constructed that encode two hybrid proteins: one consists of the DNA-binding domain of a transcription activator protein fused to a known protein, in this case, a protein known to be involved in growth of the organism, or in pathogenicity, and the other consists of the activator protein's activation domain fused to an unknown protein that is encoded by a cDNA which has been recombined into this plasmid as part of a cDNA library. The plasmids are transformed into a strain of the yeast S. cerevisiae that contains a reporter gene (e.g., lacZ) whose regulatory region contains the transcription activator's binding sites. Either hybrid protein alone cannot activate transcription of the reporter gene, the DNA-binding domain hybrid cannot because it does not provide activation function, and the activation domain hybrid cannot because it cannot localize to the activator's binding sites. Interaction of the two hybrid proteins reconstitutes the functional activator protein and results in expression of the reporter gene, which is detected by an assay for the reporter gene product.

[0381] The two-hybrid system or related methodology is used to screen activation domain libraries for proteins that interact with a known “bait” gene product. By way of example, and not by way of limitation, target essential gene products and target virulence gene products are used as the bait gene products. Total genomic or cDNA sequences encoding the target essential gene product, target virulence gene product, or portions thereof, are fused to the DNA encoding an activation domain. This library and a plasmid encoding a hybrid of the bait gene product fused to the DNA-binding domain are cotransformed into a yeast reporter strain, and the resulting transformants are screened for those that express the reporter gene. For example, and not by way of limitation, the bait gene is cloned into a vector such that it is translationally fused to the DNA encoding the DNA-binding domain of the GAL4 protein. These colonies are purified and the library plasmids responsible for reporter gene expression are isolated. DNA sequencing is then used to identify the proteins encoded by the library plasmids.

[0382] A cDNA library of the cell line from which proteins that interact with bait gene product are to be detected is made using methods routinely practiced in the art. According to the particular system described herein, for example, the cDNA fragments are inserted into a vector such that they are translationally fused to the activation domain of GAL4. This library is co-transformed along with the bait gene-GAL4 fusion plasmid into a yeast strain which contains a lacZ gene driven by a promoter which contains GAL4 activation sequence. A cDNA encoded protein, fused to GAL4 activation domain, that interacts with bait gene product reconstitutes an active GAL4 protein and thereby drive expression of the lacZ gene. Colonies which express lacZ are detected by their blue color in the presence of X-gal. The cDNA can then be purified from these strains, and used to produce and isolate the bait gene-interacting protein using techniques routinely practiced in the art.

[0383] Once a secondary target has been identified and isolated, it is further characterized and used in drug discovery by the methods of the invention.

### 5.6.3 Use of Gene Expression Arrays

[0384] To carry out profiling, gene expression arrays and microarrays can be employed. Gene expression microarrays are high density arrays of DNA samples deposited at specific, preferably spatially addressable locations on a solid substrate, such as a glass surface, silicon, nylon membrane, or the like. Such arrays are used by researchers to quantify relative gene expression under different conditions. An example of this technology is found in U.S. Pat. No. 5,807,522, which is hereby incorporated by reference.

[0385] It is possible to study the expression of substantially all of the genes in the genome of a particular microbial organism using a single array. For example, the arrays may consist of 12×24 cm nylon filters containing PCR products corresponding to ORFs from Candida albicans. An appropriate amount of each PCR product (e.g., 10 ng) are spotted every 1.5 mm on the filter. Single stranded labeled cDNAs are prepared for hybridization to the array and placed in contact with the filter. In an embodiment, no second strand synthesis or amplification step is done, and thus the labeled cDNAs are of “antisense” orientation. Quantitative analysis is done using a phosphorimager.

[0386] In one embodiment, PCR products of essential genes can be generated using pairs of oligonucleotide primers of the invention, i.e., SEQ ID NO: 4001 to 4310, and SEQ ID NO: 5001 to 5310. Ten ngs of each PCR product are spotted every 1.5 mm on the filter. Each PCR product comprises a nucleotide sequence selected from the group of nucleotide sequences consisting of SEQ ID NO: 6001 to 6310.

[0387] Hybridization of cDNA made from a sample of total cell mRNA to such an array followed by detection of binding by one or more of various techniques known to those in the art provides a signal at each location on the array to which cDNA hybridized. The intensity of the hybridization signal obtained at each location in the array thus reflects the amount of mRNA for that specific gene that was present in the sample. Comparing the results obtained for mRNA isolated from cells grown under different conditions thus allows for a comparison of the relative amount of expression of each individual gene during growth under the different conditions.

[0388] Gene expression arrays are used to analyze the total mRNA expression pattern at various time points after reduction in the level or activity of a gene product required for fungal proliferation, virulence or pathogenicity. Reduction of the level or activity of the gene product is accomplished by growing a GRACE strain under conditions in which the product of the nucleic acid linked to the regulatable promoter is rate limiting for fungal growth, survival, proliferation, virulence or pathogenicity or by contacting the cells with an agent which reduces the level or activity of the target gene product. Analysis of the expression pattern indicated by hybridization to the array provides information on other genes whose expression is influenced by reduction in the level or activity of the gene product. For example, levels of other mRNAs may be observed to increase, decrease or stay the same following reduction in the level or activity of the gene product required for growth, survival, proliferation, virulence or pathogenicity. Thus, the mRNA expression pattern observed following reduction in the level or activity of a gene product required for growth, survival, proliferation, virulence or pathogenicity identifies other nucleic acids required for growth, survival, proliferation, virulence or pathogenicity. In addition, the mRNA expression patterns observed when the fungi are exposed to candidate drug compounds or known antibiotics are compared to those observed when the level or activity of a gene product required for fungal growth, survival, proliferation, virulence or pathogenicity is reduced. If the mRNA expression pattern observed with the candidate drug compound is similar to that observed when the level of the gene product is reduced, the drug compound is a promising therapeutic candidate. Thus, the assay is useful in assisting in the selection of promising candidate drug compounds for use in drug development.

[0389] In cases where the source of nucleic acid deposited on the array and the source of the nucleic acid being hybridized to the array are from two different microorganisms, gene expression identify homologous genes in the two microorganisms.

### 5.7 Proteomics Assays

[0390] In another embodiment of the present invention, and in much the same way that a mutant strain collection (e.g, GRACE strain collection) enables transcriptional profiling within a pathogen, a mutant strain collection provides an invaluable resource for the analysis of the expressed protein complement of a genome. By evaluating the overall protein expression by members of a mutant strain collection under repressing and non-repressing growth conditions, a correlation between the pattern of protein expression of a cell can be made with the non-expression or the level of expression of an essential gene. A plurality of protein expression patterns will be generated for a mutant strain when the strain is cultured under different conditions and different levels of expression of one of the modified allele. The set of proteins analyzed comprises one or more proteins comprising an amino acid sequence selected from the group consisting of the amino acid sequences of SEQ ID NO: 7000 to 7310. A preferred mutant strain collection for performing such analysis is a GRACE strain collection.

[0391] Evaluation of the full complement of proteins expressed within a cell depends upon definitive identification of all protein species detectable on two-dimensional polyacrylamide gels or by other separation techniques. However, a significant fraction of these proteins are of lower abundance and fall below the threshold level required for positive identification by peptide sequencing or mass spectrometry. Nevertheless, these “orphan” proteins are detectable using an analysis of protein expression by individual mutant strain (GRACE strains). Conditional expression of low abundance gene products facilitates their positive identification by comparing protein profiles of mutant strains (GRACE strains) under repressing versus nonrepressing or overexpression conditions. In some cases, a more complex protein profile results because of changes of steady state levels for multiple proteins, which is caused indirectly by manipulating the low abundance gene in question. Overexpression of individual targets within the GRACE strain collection can also directly aid orphan protein identification by providing sufficient material for peptide sequencing or mass spectrometry.

[0392] In yet another embodiment, defined genetic mutations can be constructed to create strains exhibiting protein expression profiles comparable to those observed upon treatment of the strain with a previously uncharacterized compound. In this way, it is possible to distinguish between antimycotic compounds that act on multiple targets in a complicated manner from other potential lead compounds that act on unique fungal-specific targets and whose mode of action can be determined. Matching the pattern of protein expression determined after treatment of a strain with a lead compound with that obtained with a particular essential target gene under repressing conditions, can be used to identity the target and possible mode of action of the drug.

[0393] Accordingly, the invention provides a pattern of expression of a set of proteins in a mutant strain as determined by methods well known in the art for establishing a protein expression pattern. The pattern typically takes the form of computer data comprising the identities of the proteins, and for each protein, an indicator for the presence or absence of the proteins, and/or a level of expression expressed in absolute value or in a value relative to a standard. Two-dimensional gel electrophoresis is well known in the art for generating and qualitatively analyzing a pattern of expression of a set of proteins. Mass spectroscopy is a highly accurate analytical tool for determining molecular weights and identifying chemical structures. Proteins and peptides have been studied by matrix-assisted laser desorption mass spectroscopy and electrospray ionization mass spectroscopy. See, for example, Chait, Brian T. and Kent, Stephen B. H., 1992, “Weighing Naked Proteins: Practical, High-Accuracy Mass Measurement of Peptides and Proteins”, Science, 257:1885-1894, and U.S. Pat. No. 6,391,649, which are incorporated by reference herein. Matrix-assisted laser desorption time-of-flight mass spectrometers are described in U.S. Pat. Nos. 5,045,694 and 5,453,247, which are incorporated by reference herein. Electrospray ionization mass spectrometers are described in U.S. Pat. No. 5,245,186 and U.S. Pat. No. 4,977,320, which are also incorporated by reference herein. For a detailed description of methods and protocols that can be used to analyze the protein expression patterns, see for example, Link, “2-D Proteome Analysis Protocols”, Humana Press 1988.

[0394] In various embodiments, the present invention provides a method of quantitative analysis of the expressed protein complement of a diploid pathogenic fungal cell: a first protein expression profile is developed for a control diploid pathogenic fungus, which has two, unmodified alleles for the target gene. Mutants of the control strain, in which one allele of the target gene is inactivated, for example, in a GRACE strain, by insertion by or replacement with a disruption cassette, is generated. The other allele is modified such that expression of that second allele is under the control of a heterologous regulated promoter. A second protein expression profile is developed for this mutant fungus, under conditions where the second allele is substantially overexpressed as compared to the expression of the two alleles of the gene in the control strain. Similarly, if desired, a third protein expression profile is developed, under conditions where the second allele is substantially underexpressed as compared to the expression of the two alleles of the gene in the control strain. The first protein expression profile is then compared with the second expression profile, and if applicable, a third protein expression profile to identify an expressed protein detected at a higher level in the second profile, and if applicable, at a lower level in the third profile, as compared to the level in first profile.

[0395] Accordingly, the invention provides a method for evaluating a compound against a target gene product encoded by a nucleotide sequence comprising one of SEQ ID NO: 6001 through to 6310, said method comprising the steps of (a) contacting wild type diploid fungal cells or control cells with the compound and generating a first protein expression profile; (b) determining the protein expression profile of mutant diploid fungal cells, such as a GRACE strain, which have been cultured under conditions wherein the second allele of the target gene is substantially underexpressed, not expressed or overexpressed and generating a second protein expression profile for the cultured cells; and comparing the first protein expression profile with the second protein expression profile to identify similarities in the profiles. For comparisons, similarities of profiles can be expressed as an indicator value; and the higher the indicator value, the more desirable is the compound.

### 5.8 Pharmaceutical Compositions And Uses Thereof

[0396] Compounds including nucleic acid molecules that are identified by the methods of the invention as described herein can be administered to a subject at therapeutically effective doses to treat or prevent infections by a pathogenic organism, such as Candida albicans. Depending on the target, the compounds may also be useful for treatment of a non-infectious disease in a subject, such as but not limited to, cancer. A therapeutically effective dose refers to that amount of a compound (including nucleic acid molecules) sufficient to result in a healthful benefit in the treated subject. Typically, but not so limited, the compounds act by reducing the activity or level of a gene product encoded by a nucleic acid comprising a sequence selected from the group consisting of SEQ ID NO: 6001 through to 6310. The subject to be treated can be a plant, a vertebrate, a mammal, an avian, or a human. These compounds can also be used for preventing or containing contamination of an object by Candida albicans, or used for preventing or inhibiting formation on a surface of a biofilm comprising Candida albicans. Biofilm comprising C. albicans are found on surfaces of medical devices, such as but not limited to surgical tools, implanted devices, catheters and stents.

### 5.8.1 Effective Dose

[0397] Toxicity and therapeutic efficacy of compounds can be determined by standard pharmaceutical procedures in cell cultures or experimental animals, e.g., for determining the LD₅₀ (the dose lethal to 50% of the population) and the ED₅₀ (the dose therapeutically effective in 50% of the population). The dose ratio between toxic and therapeutic effects is the therapeutic index and it can be expressed as the ratio LD₅₀/ED₅₀. Compounds which exhibit large therapeutic indices are preferred. While compounds that exhibit toxic side effects can be used, care should be taken to design a delivery system that targets such compounds to the site of affected tissue in order to minimize potential damage to uninfected cells and, thereby, reduce side effects.

[0398] The data obtained from the cell culture assays and animal studies can be used in formulating a range of dosage for use in humans. The dosage of such compounds lies preferably within a range of circulating concentrations that include the ED₅₀ with little or no toxicity. The dosage can vary within this range depending upon the dosage form employed and the route of administration utilized. For any compound used in the method of the invention, the therapeutically effective dose can be estimated initially from cell culture assays. A dose can be formulated in animal models to achieve a circulating plasma concentration range that includes the IC₅₀ (i.e., the concentration of the test compound which achieves a half-maximal inhibition of symptoms) as determined in cell culture. Such information can be used to more accurately determine useful doses in humans. Levels in plasma can be measured, for example, by high performance liquid chromatography. A useful dosage can range from 0.001 mg/kg body weight to 10 mg/kg body weight.

### 5.8.2 Formulations and Use

[0399] Pharmaceutical compositions for use in accordance with the present invention can be formulated in conventional manner using one or more physiologically acceptable carriers or excipients.

[0400] Thus, the compounds and their physiologically acceptable salts and solvents can be formulated for administration by inhalation or insufflation (either through the mouth or the nose) or oral, buccal, parenteral or rectal administration.

[0401] For oral administration, the pharmaceutical compositions can take the form of, for example, tablets or capsules prepared by conventional means with pharmaceutically acceptable excipients such as binding agents (e.g., pregelatinised maize starch, polyvinylpyrrolidone or hydroxypropyl methylcellulose); fillers (e.g., lactose, microcrystalline cellulose or calcium hydrogen phosphate); lubricants (e.g., magnesium stearate, talc or silica); disintegrants (e.g., potato starch or sodium starch glycolate); or wetting agents (e.g., sodium lauryl sulphate). The tablets can be coated by methods well known in the art. Liquid preparations for oral administration can take the form of, for example, solutions, syrups or suspensions, or they can be presented as a dry product for constitution with water or other suitable vehicle before use. Such liquid preparations can be prepared by conventional means with pharmaceutically acceptable additives such as suspending agents (e.g., sorbitol syrup, cellulose derivatives or hydrogenated edible fats); emulsifying agents (e.g., lecithin or acacia); non-aqueous vehicles (e.g., almond oil, oily esters, ethyl alcohol or fractionated vegetable oils); and preservatives (e.g., methyl or propyl-p-hydroxybenzoates or sorbic acid). The preparations can also contain buffer salts, flavoring, coloring and sweetening agents as appropriate.

[0402] Preparations for oral administration can be suitably formulated to give controlled release of the active compound.

[0403] For buccal administration the compositions can take the form of tablets or lozenges formulated in conventional manner.

[0404] For administration by inhalation, the compounds for use according to the present invention are conveniently delivered in the form of an aerosol spray presentation from pressurized packs or a nebulizer, with the use of a suitable propellant, e.g., dichlorodifluoromethane, trichlorofluoromethane, dichlorotetrafluoroethane, carbon dioxide or other suitable gas. In the case of a pressurized aerosol the dosage unit can be determined by providing a valve to deliver a metered amount. Capsules and cartridges of e.g. gelatin for use in an inhaler or insufflator can be formulated containing a powder mix of the compound and a suitable powder base such as lactose or starch.

[0405] The compounds can be formulated for parenteral administration (i.e., intravenous or intramuscular) by injection, via, for example, bolus injection or continuous infusion. Formulations for injection can be presented in unit dosage form, e.g., in ampoules or in multi-dose containers, with an added preservative. The compositions can take such forms as suspensions, solutions or emulsions in oily or aqueous vehicles, and can contain formulatory agents such as suspending, stabilizing and/or dispersing agents. Alternatively, the active ingredient can be in powder form for constitution with a suitable vehicle, e.g., sterile pyrogen-free water, before use.

[0406] The compounds can also be formulated in rectal compositions such as suppositories or retention enemas, e.g., containing conventional suppository bases such as cocoa butter or other glycerides.

[0407] In addition to the formulations described previously, the compounds can also be formulated as a depot preparation. Such long acting formulations can be administered by implantation (for example subcutaneously or intramuscularly) or by intramuscular injection. Thus, for example, the compounds can be formulated with suitable polymeric or hydrophobic materials (for example as an emulsion in an acceptable oil) or ion exchange resins, or as sparingly soluble derivatives, for example, as a sparingly soluble salt.

### 6. EXAMPLES

[0408] Several known essential genes are used as examples to demonstrate the construction and uses of a GRACE strain. All methods described herein can be applied to the essential genes of the invention.

### 6.1 Construction of a GRACE Strain Containing Modified Alleles of CaKRE9

[0409] Oligonucleotide primers for PCR amplification of the SAT selectable marker used in Step 1 (i.e. gene replacement) contain 25 nucleotides complementary to the SAT disruption cassette in pRC18-ASP, and 65 nucleotides homologous to regions flanking the CaKRE9 open reading frame. FIG. 2 illustrates the 2.2 kb cakre9D::SAT disruption fragment produced after PCR amplification and resulting gene replacement of the first wild type CaKRE9 allele via homologous recombination following transformation. PCR conditions were as follows: 5-50 ng pRC18-ASP, 100 pmol of each primer, 200 mM dNTPs, 10 mM Tris-pH 8.3, 1.5 mM MgCl₂, 50 mM KCl, 1 unit Taq DNA polymerase (Gibco). PCR amplification times were: 5 min 94° C., 1 min 54° C., 2 min 72° C., for 1 cycle; 45 sec 94° C., 45 sec 54° C., 2 min 72° C., for 30 cycles. Transformation was performed using the lithium acetate method adapted for C. albicans, by Braun and Johnson, (Braun, B. R., and A. D. Johnson (1997), Control of filament formation in Candida albicans by the transcriptional repressor TUP1, Science 277:105-109), with minor modifications, including shorter incubation times at 30° C. and 42° C. (1 hr and 5 min respectively) and a greater amount of material transformed (50 mg of ethanol-precipitated cakre9D::SATPCR product). Transformed cells were spread onto YPD plates and incubated overnight at 30° C., providing a preincubation period for expression of SAT prior to replica plating onto YPD medium containing streptothricin (400 mg/ml). Streptothricin-resistant colonies were detected after 36 hr and cakre9D::SAT/CaKRE9 heterozygotes identified by PCR analysis using suitable primers which amplify both CaKRE9 and cakre9D::SAT alleles.

[0410] Oligonucleotide primers for PCR amplification of the conditional promoter used in Step 2 (i.e. promoter replacement) contain 25 nucleotides complementary to the CaHIS3-marked tetracycline regulated promoter cassette in pBSK-HT4 and 65 nucleotides of homologous sequence corresponding to promoter regions −270 to −205, relative to the point of transcription initiation, and nucleotides 1-65 of the CaKRE9 open reading frame. The resulting 2.2 kb PCR product was transformed into the cakre9D::SAT/CaKRE9 heterozygous strain produced in step 1, and His⁺ transformants selected on YNB agar. Bonafide CaKRE9 GRACE strains containing both a cakre9D::SAT allele and CaHIS3-Tet-CaKRE9 allele were determined by PCR analysis. Typically, 2 independent GRACE strains are constructed and evaluated to provide a reliable determination of the terminal phenotype of any given drug target. Terminal phenotype is that phenotype caused by the absence of the gene product of an essential gene

### 6.2 Phenotype Determination of the CaKRE9 Grace strain

[0411] The terminal phenotype of the resulting GRACE strains was evaluated in three independent methods. In the first, rapid determination of the CaKRE9 GRACE strain terminal phenotype was achieved by streaking approximately 1.0×10⁶ cells onto both a YNB plate and YNB plate containing 100 mg/ml tetracycline and comparing growth rate after 48 hr at room temperature. For essential genes, such as CaKRE9, no significant growth is detected in the presence of tetracycline. In the second approach, the essential nature of a gene may be determined by streaking CaKRE9 GRACE cells onto a casamino acid plate containing 625 mg/ml 5-fluroorotic acid (5FOA) and 100 mg/ml uridine to select for ura-cells which have excised (via recombination between CaLEU2 sequence duplications created during targeted integration) the transactivator gene that is normally required for expression of the tetracycline promoter-regulated target gene. Again, whereas nonessential GRACE strains demonstrate robust growth under such conditions, essential GRACE strains fail to grow. Quantitative evaluation of the terminal phenotype associated with an essential GRACE strain is performed using 2×10³ cells/ml of overnight culture inoculated into 5.0 ml YNB either lacking or supplemented with 100 mg/ml tetracycline and measuring optical density (O.D.600) after 24 and 48 hr incubation at 30° C. Typically, for essential GRACE strains, no significant increase in optical density is detected after 48 hrs. Discrimination between cell death (cidal) and growth inhibitory (static) terminal phenotypes for a demonstrated essential gene is achieved by determining the percentage of viable cells (as judged by the number of colony forming units (CFU) from an equivalent of 2×10³ washed cells at T=0) from the above tetracycline-treated cultures after 24 and 48 hours of incubation. Essential GRACE strains producing a cidal terminal phenotype are those which display a reduction in percent viable cells (i.e. <2×10³ CFU) following incubation under repressing conditions.

### 6.3 Target Level Variation in Whole Cell Assays

[0412] In order to demonstrate the utility of target level expression in whole cell assays for drug screening, both a CaHIS3 heterozygote strain and a tetracycline promoter-regulated CaHIS3 GRACE strain were compared against a wild type (diploid) CaHIS3 strain for sensitivity towards the 3-aminotriazole (3-AT) (FIG. 6). 3-AT is a competitive inhibitor of the enzyme encoded by CaHIS3, imidazoleglycerol phosphate dehydratase, and together serve as a model for a drug and drug target respectively. Overexpression, achieved by the constitutive expression level of CaHIS3 maintained by the tetracycline promoter, confers 3-AT resistance at concentrations sufficient to completely inhibit growth of both wild type and CaHIS3 heterozygote strains (FIG. 6A). The phenotype observed is consistent with that expected in light of the predicted 7.5 fold overexpression of CaHIS3 determined by Northern bolt analysis (see FIG. 5). A heterozygous CaHIS3 strain demonstrates enhanced sensitivity (i.e. haploinsufficient phenotype) to an intermediate 3-AT concentration unable to effect either wild type or tetracycline promoter-based overproducing CaHIS3 strains noticeably (FIG. 6B). A third CaHIS3 expression level evaluated for differential sensitivity to 3-AT was produced by partial repression of the GRACE CaHIS3 strain using a threshold concentration of tetracycline 0.1% that normally is used to achieve complete shut-off.

[0413] This level of CaHIS3 expression represents the minimum expression level required for viability and as predicted, demonstrates an enhanced drug sensitivity relative the heterozygous CaHIS3 strain at an intermediate 3-AT concentration (FIG. 6C). Similarly, GRACE strain-specific drug resistance and sensitivity phenotypes to fluconazole and tunicamycin have been demonstrated by increasing and decreasing the level of expression of their respective known drug targets, CaERG11 and CaALG7. Together these results demonstrate that three different levels of expression are achieved using the C. albicans GRACE strain collection, and that they exhibit the predicted drug sensitivity phenotypes between known drugs and their known drug target. Moreover, these experiments clearly indicate how distinct levels of target gene products synthesized within the pathogen could be directly applied in whole cell assay based drug screens to identify novel antifungal compounds against those novel drug targets validated using the GRACE method.

### 6.4 Identification of a Target Pathway

[0414] A target pathway is a genetic or biochemical pathway wherein one or more of the components of the pathway (e.g., enzymes, signaling molecules, etc) is a drug target as determined by the methods of the invention.

### 6.4.1 Preparation of Stocks of GRACE Strains for Assay

[0415] To provide a consistent source of cells to screen, frozen stocks of host GRACE strains are prepared using standard microbiological techniques. For example, a single clone of the microorganism can be isolated by streaking out a sample of the original stock onto an agar plate containing nutrients for cell growth and an antibiotic for which the GRACE strain contains a gene which confers resistance. After overnight growth an isolated colony is picked from the plate with a sterile needle and transferred to an appropriate liquid growth medium containing the antibiotic to which the GRACE strain is resistant. The cells are incubated under appropriate growth conditions to yield a culture in exponential growth. Cells are frozen using standard techniques.

### 6.4.2 Growth of GRACE Strains for Use in the Assay

[0416] Prior to performing an assay, a stock vial is removed from the freezer, rapidly thawed and a loop of culture is streaked out on an agar plate containing nutrients for cell growth and an antibiotic for which the GRACE strain contains a gene which confers resistance. After overnight growth, randomly chosen, isolated colonies are transferred from the plate (sterile inoculum loop) to a sterile tube containing medium containing the antibiotic to which the GRACE strain contains a gene which confers resistance. After vigorous mixing to form a homogeneous cell suspension, the optical density of the suspension is measured and if necessary an aliquot of the suspension is diluted into a second tube of medium plus antibiotic. The culture is then incubated until the cells reach an optical density suitable for use in the assay.

### 6.4.3 Selection of Medium to be Used in Assay

[0417] Two-fold dilution series of the inducer or repressor for the regulatable promoter which is linked to the gene required for the fungal proliferation, virulence or pathogenicity of the GRACE strain are generated in culture medium containing the appropriate antibiotic for which the GRACE strain contains a gene which confers resistance. Several medium are tested side by side and three to four wells are used to evaluate the effects of the inducer or repressor at each concentration in each media. Equal volumes of test media-inducer or repressor and GRACE cells are added to the wells of a 384 well microtiter plate and mixed. The cells are prepared as described above and diluted in the appropriate medium containing the test antibiotic immediately prior to addition to the microtiter plate wells. For a control, cells are also added to several wells of each medium that do not contain inducer or repressor. Cell growth is monitored continuously by incubation by monitoring the optical density of the wells. The percent inhibition of growth produced by each concentration of inducer or repressor is calculated by comparing the rates of logarithmic growth against that exhibited by cells growing in medium without inducer or repressor. The medium yielding greatest sensitivity to inducer or repressor is selected for use in the assays described below.

### 6.4.4 Measurement of Test Antibiotic Sensitivity in GRACE Strains in which the Level of the Target Gene Product is not Rate Limiting

[0418] Two-fold dilution series of antibiotics of known mechanism of action are generated in the culture medium selected for further assay development that has been supplemented with the antibiotic used to maintain the GRACE strain. A panel of test antibiotics known to act on different pathways is tested side by side with three to four wells being used to evaluate the effect of a test antibiotic on cell growth at each concentration. Equal volumes of test antibiotic and cells are added to the wells of a 384 well microtiter plate and mixed. Cells are prepared as described above using the medium selected for assay development supplemented with the antibiotic required to maintain the GRACE strain and are diluted in identical medium immediately prior to addition to the microtiter plate wells. For a control, cells are also added to several wells that lack antibiotic, but contain the solvent used to dissolve the antibiotics. Cell growth is monitored continuously by incubation in a microtiter plate reader monitoring the optical density of the wells. The percent inhibition of growth produced by each concentration of antibiotic is calculated by comparing the rates of logarithmic growth against that exhibited by cells growing in medium without antibiotic. A plot of percent inhibition against log [antibiotic concentration] allows extrapolation of an IC₅₀ value for each antibiotic.

### 6.4.5 Measurement of Test Antibiotic Sensitivity in the GRACE Strains in which the Level of the Target Gene Product is Rate Limiting

[0419] The culture medium selected for use in the assay is supplemented with inducer or repressor at concentrations shown to inhibit cell growth by a desired amount as described above, as well as the antibiotic used to maintain the GRACE strain. Two fold dilution series of the panel of test antibiotics used above are generated in each of these media. Several antibiotics are tested side by side in each medium with three to four wells being used to evaluate the effects of an antibiotic on cell growth at each concentration. Equal volumes of test antibiotic and cells are added to the wells of a 384 well microtiter plate and mixed. Cells are prepared as described above using the medium selected for use in the assay supplemented with the antibiotic required to maintain the GRACE strain. The cells are diluted 1:100 into two aliquots of identical medium containing concentrations of inducer that have been shown to inhibit cell growth by the desired amount and incubated under appropriate growth conditions. Immediately prior to addition to the microtiter plate wells, the cultures are adjusted to an appropriate optical density by dilution into warm sterile medium supplemented with identical concentrations of the inducer and antibiotic used to maintain the GRACE strain. For a control, cells are also added to several wells that contain solvent used to dissolve test antibiotics but which contain no antibiotic. Cell growth is monitored continuously by incubation under suitable growth conditions in a microtiter plate reader monitoring the optical density of the wells. The percent inhibition of growth produced by each concentration of antibiotic is calculated by comparing the rates of logarithmic growth against that exhibited by cells growing in medium without antibiotic. A plot of percent inhibition against log [antibiotic concentration] allows extrapolation of an IC₅₀ value for each antibiotic.

### 6.4.6 Determining the Specificity of the Test Antibiotics

[0420] A comparison of the IC50s generated by antibiotics of known mechanism of action under conditions in which the level of the gene product required for fungal proliferation, virulence or pathogenicity is rate limiting or is not rate limiting allows the pathway in which a gene product required for fungal proliferation, virulence or pathogenicity lies to be identified. If cells expressing a rate limiting level of a gene product required for fungal proliferation, virulence or pathogenicity are selectively sensitive to an antibiotic acting via a particular pathway, then the gene product encoded by the gene linked to the regulatable promoter in the GRACE strain is involved in the pathway on which the antibiotic acts.

### 6.4.7 Identification of Pathway in which a Test Antibiotic Acts

[0421] As discussed above, the cell-based assay may also be used to determine the pathway against which a test antibiotic acts. In such an analysis, the pathways against in which the gene under the control of the regulatable promoter in each member of a panel of GRACE strains lies is identified as described above. A panel of cells, each containing a regulatable promoter which directs transcription of a proliferation, virulence or pathogenicity-required nucleic acid which lies in a known biological pathway required for fungal proliferation, virulence or pathogenicity, is contacted with a test antibiotic for which it is desired to determine the pathway on which it acts under conditions in which the gene product of the nucleic acid is rate limiting or is not rate limiting. If heightened sensitivity is observed in cells in which the gene product is rate limiting for a gene product which lies in a particular pathway but not in cells expressing rate limiting levels of gene products which lie in other pathways, then the test antibiotic acts against the pathway for which heightened sensitivity was observed.

[0422] All references cited herein are incorporated herein by reference in their entirety and for all purposes to the same extent as if each individual publication or patent or patent application was specifically and individually indicated to be incorporated by reference in its entirety for all purposes.

[0423] Many modifications and variations of this invention can be made without departing from its spirit and scope, as will be apparent to those skilled in the art. The specific embodiments described herein are offered by way of example only, and the invention is to be limited only by the terms of the appended claims, along with the full scope of equivalents to which such claims are entitled.

The application's sequence listing, which the Patent Office published only in electronic form, follows.

SEQUENCE LISTING (8000 sequences)

SEQ ID NO: 1 - DNA, 43 bp, Candida albicans
tatcacatcatcttgtcttagaccaaacttccacgttcaatga

SEQ ID NO: 2 - DNA, 43 bp, Candida albicans
ttcttgtaaaaacaattaacgatcaagtataggttattagaat

SEQ ID NO: 3 - DNA, 43 bp, Candida albicans
ctatctcatcccatcttttgccattctcatcccatcccactaa

SEQ ID NO: 4 - DNA, 43 bp, Candida albicans
caagaacttgaaagtcaagaccaaaacaaattagcatttcaca

SEQ ID NO: 5 - DNA, 43 bp, Candida albicans
caaggtcaggagtggtttttatatatacaacaactaaacaaaa

SEQ ID NO: 6 - DNA, 43 bp, Candida albicans
ctatcaatccaaacatagacacatagttgattattaatcatgt

SEQ ID NO: 7 - DNA, 43 bp, Candida albicans
atctaccacaacccatttaatcaatttaattgcgctgattcaa

SEQ ID NO: 8 - DNA, 43 bp, Candida albicans
ctctatatctatacatacacacattcacaaataaccaatagtc

SEQ ID NO: 9 - DNA, 43 bp, Candida albicans
ccaaggatgttgtggaaactactacgtttattcattattatta

SEQ ID NO: 10 - DNA, 43 bp, Candida albicans
aacgttttccggatctaaaagtattttcatttgccaacgaact

SEQ ID NO: 11 - DNA, 43 bp, Candida albicans
accactactgctactgctaccactgttaagatgaagttttctc

SEQ ID NO: 12 - DNA, 43 bp, Candida albicans
gttagataactagacatgccttcctcatcacaagtttatagat

SEQ ID NO: 13 - DNA, 43 bp, Candida albicans
caaaatcaactattatacaataaatcatgactaccgattcagt

SEQ ID NO: 14 - DNA, 43 bp, Candida albicans
tttctttcttattaactattataatatactttattaatcaatc

SEQ ID NO: 15 - DNA, 43 bp, Candida albicans
gacaaacaaaaaataaagttatagagaatagtgccagtccatc

SEQ ID NO: 16 - DNA, 43 bp, Candida albicans
ttgttgtttttccatcattatcatccactattctctctcgaca

SEQ ID NO: 17 - DNA, 43 bp, Candida albicans
cagattacacaatcatatatatatatatataaatcattgaatc

SEQ ID NO: 18 - DNA, 43 bp, Candida albicans
ttttgtttacaaaagaacaataataacaatcataaatataata

SEQ ID NO: 19 - DNA, 43 bp, Candida albicans
taatacactttcttacccacgataagataaaccacaattcact

SEQ ID NO: 20 - DNA, 43 bp, Candida albicans
aaaatcacttagttgtattcatttctatccacattaataacaa

SEQ ID NO: 21 - DNA, 43 bp, Candida albicans
actactacaatttttttttttggtgaaacctatttgcttcaga

SEQ ID NO: 22 - DNA, 43 bp, Candida albicans
tggttttttactctggatgggttgaatcaccatcaaactgaaa

SEQ ID NO: 23 - DNA, 43 bp, Candida albicans
cctccatcaatcctattttttttttttttgcatccattagact

SEQ ID NO: 24 - DNA, 43 bp, Candida albicans
cactagaaaaatttattttccctccacttcccttttctatata

SEQ ID NO: 25 - DNA, 43 bp, Candida albicans
tgatgatgttgataagaaatatcgatcgaaaggttattttgaa

SEQ ID NO: 26 - DNA, 43 bp, Candida albicans
atatcctttcaaataaccaactccctttctttatatatatatt

SEQ ID NO: 27 - DNA, 43 bp, Candida albicans
atatcatcagtataaagctttaactactacatacaaataaatc

SEQ ID NO: 28 - DNA, 43 bp, Candida albicans
tgaaatatgctagcaactgttgcatatcacgtgcttggtcact

SEQ ID NO: 29 - DNA, 43 bp, Candida albicans
tactacttagaaacactttctactagaccaaaccataccaact

SEQ ID NO: 30 - DNA, 43 bp, Candida albicans
caaaacaaaacaaaccaagcaattgattagcaaatcacaaaga

SEQ ID NO: 31 - DNA, 43 bp, Candida albicans
aatctactttacaagaatatttgttaatttccctaatcttata

SEQ ID NO: 32 - DNA, 43 bp, Candida albicans
ccacaataaagctattacaattccaacagaaacaacaccagcc

SEQ ID NO: 33 - DNA, 43 bp, Candida albicans
tagagtggcgactgaaagtagacaagattcgaaaacttcaacc

SEQ ID NO: 34 - DNA, 43 bp, Candida albicans
agtaccacatgaagatattacagattgcaaatcaagttgatca

SEQ ID NO: 35 - DNA, 43 bp, Candida albicans
gccatcttttcattgatatacataatatagagatattcccaca

SEQ ID NO: 36 - DNA, 43 bp, Candida albicans
tgttataaaaattccgttgattataatcaagatcctccattag

SEQ ID NO: 37 - DNA, 43 bp, Candida albicans
aaattttcaaaaccatagacattgacaactacagacaggccaa

SEQ ID NO: 38 - DNA, 43 bp, Candida albicans
aatctttctgttttttttttctttaatcttcaacgtttataca

SEQ ID NO: 39 - DNA, 43 bp, Candida albicans
tagctttgaaaacccaaaaccataggtatatactaactgcaaa

SEQ ID NO: 40 - DNA, 43 bp, Candida albicans
attctcacaaaccatagcatatacacatacagcatcacttact

SEQ ID NO: 41 - DNA, 43 bp, Candida albicans
tacaactgaattaaatatcaccattttgtaattttataaccaa

SEQ ID NO: 42 - DNA, 43 bp, Candida albicans
ctggaaagggggaaaattagtgaaagaataccaattattaaac

SEQ ID NO: 43 - DNA, 43 bp, Candida albicans
aggatatttggacaggtgtacgaaagattcatcataccaagct

SEQ ID NO: 44 - DNA, 43 bp, Candida albicans
gcttggaataactgaaaatagcaatagcttacctcagcactaa

SEQ ID NO: 45 - DNA, 43 bp, Candida albicans
gaacttgaattgtgaacaacacaacttataattatacagaatc

SEQ ID NO: 46 - DNA, 43 bp, Candida albicans
catgttttaaaagcattcatcccggagtcaataacgaggtcag

SEQ ID NO: 47 - DNA, 43 bp, Candida albicans
catcattagctaacacagactgcagacatacccacatatctca

SEQ ID NO: 48 - DNA, 43 bp, Candida albicans
ttcaaactttcgaactttccattattatcaaattattctagaa

SEQ ID NO: 49 - DNA, 43 bp, Candida albicans
agggtgatttgttcactattttcctctccacttttaagcaaac

SEQ ID NO: 50 - DNA, 43 bp, Candida albicans
tataatttgatttacttagcacaggaaaacattcgagacgcaa

SEQ ID NO: 51 - DNA, 43 bp, Candida albicans
ccaaaaagcataattttcacaacaattaccagcaaaccttaac

SEQ ID NO: 52 - DNA, 43 bp, Candida albicans
aacaatctatttcgttttataaactataccactaacaatcaac

SEQ ID NO: 53 - DNA, 43 bp, Candida albicans
aaaagattaacaatatacatcaaggggttccgtgacctaaata

SEQ ID NO: 54 - DNA, 43 bp, Candida albicans
tcccacacaacttcttcttttacttaaccaccaactaccgata

SEQ ID NO: 55 - DNA, 43 bp, Candida albicans
ttttattcactagattcttcagttcttgggatcaatcatcaga

SEQ ID NO: 56 - DNA, 43 bp, Candida albicans
aatattttcccctttttatatctaaatttcataaatcccaatc

SEQ ID NO: 57 - DNA, 43 bp, Candida albicans
ttgaacaacaatacattggattctgcataaccattaagtattc

SEQ ID NO: 58 - DNA, 43 bp, Candida albicans
atatatattattggagtacaacaagtaaccaatatacctacca

SEQ ID NO: 59 - DNA, 43 bp, Candida albicans
catcttattctcatcacacacgcatatacaagcactacacata

SEQ ID NO: 60 - DNA, 43 bp, Candida albicans
ttcagtttcttcttcaaataataataataatatatttgcaaca

SEQ ID NO: 61 - DNA, 43 bp, Candida albicans
tcctaataccaataaataaactgttgttgttgtctcaaaaacc

SEQ ID NO: 62 - DNA, 43 bp, Candida albicans
tatatactatttgaagattattaattgatacattcaaacaaca

SEQ ID NO: 63 - DNA, 43 bp, Candida albicans
ctttttttttttcattattctcccatttatctacctgtccatc

SEQ ID NO: 64 - DNA, 43 bp, Candida albicans
tccccccccccttttattcctaatcataatcatcctgatcatc

SEQ ID NO: 65 - DNA, 43 bp, Candida albicans
aactgaaaacaacaattagtataattcaattcaatattaagca

SEQ ID NO: 66 - DNA, 43 bp, Candida albicans
tcaagcattattcttgaagaaatcagaatccatagcctacacg

SEQ ID NO: 67 - DNA, 43 bp, Candida albicans
ctatatacccttcttcattagatcagtttctgtccccccaatc

SEQ ID NO: 68 - DNA, 43 bp, Candida albicans
ataccactactagtttattacaaaccattatcagcaattcaac

SEQ ID NO: 69 - DNA, 43 bp, Candida albicans
tttttctttttcttcttctttgtctttctaatagaccaaagtc

SEQ ID NO: 70 - DNA, 43 bp, Candida albicans
gaacatcaactaaccaaatataacacataaaaacctttttatt

SEQ ID NO: 71 - DNA, 43 bp, Candida albicans
cctcccgcccccccatttttcttcactatattttaaacacacc

SEQ ID NO: 72 - DNA, 43 bp, Candida albicans
atttttttttccttttcaatactctgaatagttaataaccaat

SEQ ID NO: 73 - DNA, 43 bp, Candida albicans
tatcaacactgtgaaatatcgtaatcttttgttcttctttcta

SEQ ID NO: 74 - DNA, 43 bp, Candida albicans
ccaagtcatttttatttcctttcttttaccattgcacctgact

SEQ ID NO: 75 - DNA, 43 bp, Candida albicans
agatgcaaatgtctacactaagcataattcaataccaataatc

SEQ ID NO: 76 - DNA, 43 bp, Candida albicans
cactaacctactcatcagcctattttaatttatccttttggct

SEQ ID NO: 77 - DNA, 43 bp, Candida albicans
aatcagtacactttttcatcactcagttattttattcaacatc

SEQ ID NO: 78 - DNA, 43 bp, Candida albicans
atttgttatttataatacatattctatagaaaactaccccaat

SEQ ID NO: 79 - DNA, 43 bp, Candida albicans
caaattaatttaacaaatacattgaattacaattacatttaca

SEQ ID NO: 80 - DNA, 43 bp, Candida albicans
gtttttaatttctaaaccatcaatctttaattagcccacgccg

SEQ ID NO: 81 - DNA, 43 bp, Candida albicans
ttcctcattctaccactgtctactttaatcactcgacacaact

SEQ ID NO: 82 - DNA, 43 bp, Candida albicans
tacattccttacaatataattaaaattcaataaaataaccatt

SEQ ID NO: 83 - DNA, 43 bp, Candida albicans
gtccaaaaaaatacataataattagaatttcaatttgaacaac

SEQ ID NO: 84 - DNA, 43 bp, Candida albicans
accaagtgtaagagttggtgtctaatacaaatcctacaacaat

SEQ ID NO: 85 - DNA, 43 bp, Candida albicans
atacttaatgagtcaattttaccgcgattgatatctttcgttg

SEQ ID NO: 86 - DNA, 43 bp, Candida albicans
ttcgaatagagcgatccaaaaagacaaccacattttcctgatc

SEQ ID NO: 87 - DNA, 43 bp, Candida albicans
tttatacccttaacaaaacaagccaaaaagaaataaaagtatc

SEQ ID NO: 88 - DNA, 43 bp, Candida albicans
cacttcttccattcttatttttattttgggaatagtagctact

SEQ ID NO: 89 - DNA, 43 bp, Candida albicans
aattccccaatggtttggggttggattattctgactatcaagc

SEQ ID NO: 90 - DNA, 43 bp, Candida albicans
ttatttttctttgttataaaacccatacaatatagcaacaacc

SEQ ID NO: 91 - DNA, 43 bp, Candida albicans
caattacaaacttgaattgaaatcaaattaaacctcatagacg

SEQ ID NO: 92 - DNA, 43 bp, Candida albicans
ttcttttcaaccacttgccaacatacaaccactccatctatca

SEQ ID NO: 93 - DNA, 43 bp, Candida albicans
atattactttttgtatttgatctcttcaaaataatcaaccatc

SEQ ID NO: 94 - DNA, 43 bp, Candida albicans
atcattctttctacttgatgtatattcatttcaattactaaac

SEQ ID NO: 95 - DNA, 43 bp, Candida albicans
ctttaaatcgaattttattgactaccatcttcctgaattaact

SEQ ID NO: 96 - DNA, 43 bp, Candida albicans
taaattacgagacatagtaatatttctattgttgatatccagt

SEQ ID NO: 97 - DNA, 43 bp, Candida albicans
ccgaacaagaacaacaacaacttgactgttcaaacaattacca

SEQ ID NO: 98 - DNA, 43 bp, Candida albicans
gttttcagatattattaaagtatcttttactaattgacaaaag

SEQ ID NO: 99 - DNA, 43 bp, Candida albicans
aatgcgttgattgaagtatattgaagtcaattgaatttgaaat

SEQ ID NO: 100 - DNA, 43 bp, Candida albicans
aactaattgacacactcaaacattcataccaaccccaaccagt

SEQ ID NO: 101 - DNA, 43 bp, Candida albicans
attcatatcaaacacccaactcttttctttttttctattaatt

SEQ ID NO: 102 - DNA, 43 bp, Candida albicans
atccatttcacatattattgttaatcaaacatagcaatcaaag

SEQ ID NO: 103 - DNA, 43 bp, Candida albicans
aaattatatatatacccagaaggaaggaactatttttaaaaac

SEQ ID NO: 104 - DNA, 43 bp, Candida albicans
cagcactccaccctgttgaagattatatgattcaagagtattc

SEQ ID NO: 105 - DNA, 43 bp, Candida albicans
aaccaaactaatctatacctattaatcaatcccctctcctcca

SEQ ID NO: 106 - DNA, 43 bp, Candida albicans
tttttacattcctacaactaatctttcataaagttatttatca

SEQ ID NO: 107 - DNA, 43 bp, Candida albicans
aacacactcgactttccatcatcatatcctagcattgtacaaa

SEQ ID NO: 108 - DNA, 43 bp, Candida albicans
gctacgtgcatatcatcaagttaaatattccaaattagccgaa

SEQ ID NO: 109 - DNA, 43 bp, Candida albicans
ttttcaattcacatatctattattattattaacaacatttatc

SEQ ID NO: 110 - DNA, 43 bp, Candida albicans
gtttctttcatccccattcacaagcatttcaattttcaatatc

SEQ ID NO: 111 - DNA, 43 bp, Candida albicans
tcttcacattcttggatacttgtttgaacaggcactaactatc

SEQ ID NO: 112 - DNA, 43 bp, Candida albicans
aattttaaaaattttggtaaatttttccgtaaagatataggta

SEQ ID NO: 113 - DNA, 43 bp, Candida albicans
aactgtctagtttgttctttctttgatttctagccaataaatt

SEQ ID NO: 114 - DNA, 43 bp, Candida albicans
catttcatcaacacatacatcattttttgttttgttcatccat

SEQ ID NO: 115 - DNA, 43 bp, Candida albicans
tttttttttccaattttaaaacaatcacagtccagtcaaaaaa

SEQ ID NO: 116 - DNA, 43 bp, Candida albicans
ctattattagataaccttaaaacaaaaccaaattatactaacg

SEQ ID NO: 117 - DNA, 43 bp, Candida albicans
ccagctacaaagaattcaactataaaaacacgttttctaaacc

SEQ ID NO: 118 - DNA, 43 bp, Candida albicans
tcatacacatatacatatatatataactaaccatagaaatatt

SEQ ID NO: 119 - DNA, 43 bp, Candida albicans
acgaacttgccaaactacttctccacatcttctttagtatatc

SEQ ID NO: 120 - DNA, 43 bp, Candida albicans
cctcttcacctatacaaaccctaagtaacagttgaagaaaaaa

SEQ ID NO: 121 - DNA, 43 bp, Candida albicans
ttttttttttacaactctatccatctcatccctatctacagcc

SEQ ID NO: 122 - DNA, 43 bp, Candida albicans
ttaataacgacgttataacccaataccaaatgaaaaatatact

SEQ ID NO: 123 - DNA, 43 bp, Candida albicans
tagcataagcttcatttggtaaagtaaaggattataattcata

SEQ ID NO: 124 - DNA, 43 bp, Candida albicans
tatttatcttctttttatccctaaccactattataatctttgc

SEQ ID NO: 125 - DNA, 43 bp, Candida albicans
aatattttaccatcgattctccaccaaagcaaattatccaatt

SEQ ID NO: 126 - DNA, 43 bp, Candida albicans
ttcagcctaactttcaagtactttagatctaccacaactaatc

SEQ ID NO: 127 - DNA, 43 bp, Candida albicans
aaaatacttccatagactacattgagaaacaaatcaacttaca

SEQ ID NO: 128 - DNA, 43 bp, Candida albicans
tccactaaaaactttccatcaagctacaccagcagcatcaatt

SEQ ID NO: 129 - DNA, 43 bp, Candida albicans
ccttgtgtaagtcattaatacttaattattagcactagagata

SEQ ID NO: 130 - DNA, 43 bp, Candida albicans
tgatccataatatttacagtcaattcaagtaaacaataaactg

SEQ ID NO: 131 - DNA, 43 bp, Candida albicans
cctttaccctatcctttctatattcattgatatattatttata

SEQ ID NO: 132 - DNA, 43 bp, Candida albicans
ccaccatttacaaccattttctttctaagctaaaccgtacgct

SEQ ID NO: 133 - DNA, 43 bp, Candida albicans
cattcacatttctgaattatctatcgatctcatacgtgttgtc

SEQ ID NO: 134 - DNA, 43 bp, Candida albicans
gctagatgtgactatttatcaggaactgtttagaatttgaaac

SEQ ID NO: 135 - DNA, 43 bp, Candida albicans
ttgttttgatctttgctgtccaattcaataacatcctattaca

SEQ ID NO: 136 - DNA, 43 bp, Candida albicans
cacaatataaataccaaaccttagaaacacttaccaaaagcca

SEQ ID NO: 137 - DNA, 43 bp, Candida albicans
ttcatttgaatactcccccttatcctatatcaacttttcaaag

SEQ ID NO: 138 - DNA, 43 bp, Candida albicans
cgactaaattgattcaaataggattccctaaatgattaatgat

SEQ ID NO: 139 - DNA, 43 bp, Candida albicans
agagatagttctagtcctcgaagaggctattcagaatttgatc

SEQ ID NO: 140 - DNA, 43 bp, Candida albicans
ccaacaatgacttcaaccaacttagaaggtactttcccattaa

SEQ ID NO: 141 - DNA, 43 bp, Candida albicans
ggtgtttacaaggcattgtatgattacgctgcccaggcagaag

SEQ ID NO: 142 - DNA, 43 bp, Candida albicans
cgttggatttgcattatgaacggcccaaatggtatcgtttagc

SEQ ID NO: 143 - DNA, 43 bp, Candida albicans
atccatacaaacgtcgaagggttgttacctccacactttggaa

SEQ ID NO: 144 - DNA, 43 bp, Candida albicans
catacctccttccaatccacaaacaaatcatgtttcaacaact

SEQ ID NO: 145 - DNA, 43 bp, Candida albicans
aagacctattaatatgagtcacagtccaaatttatcacctcaa

SEQ ID NO: 146 - DNA, 43 bp, Candida albicans
caatatgcgctaaatgcttgggcgatgagtcacgaatcaagat

SEQ ID NO: 147 - DNA, 43 bp, Candida albicans
accaatagtcgctgccttattgacatcagtttcagcagcagac

SEQ ID NO: 148 - DNA, 43 bp, Candida albicans
cttaatattggattgaaatatggacaaacttgaaactttccaa

SEQ ID NO: 149 - DNA, 43 bp, Candida albicans
gaaatcacgatcaggtttacttaaagcacctaagacaattaca

SEQ ID NO: 150 - DNA, 43 bp, Candida albicans
tttatttaagggaactactacaaataatcttgataaagaaatt

SEQ ID NO: 151 - DNA, 43 bp, Candida albicans
gagtttactcatttacaaatgtcatcattatcatcagtcacca

SEQ ID NO: 152 - DNA, 43 bp, Candida albicans
tacatcaatgtcgaaacagaacatagacaagagtactgaacac

SEQ ID NO: 153 - DNA, 43 bp, Candida albicans
caatccatatcatcgatgtagaaagtggtaatttacaatcact

SEQ ID NO: 154 - DNA, 43 bp, Candida albicans
cttactttattctacccactcttcattcatattatcatgttaa

SEQ ID NO: 155 - DNA, 43 bp, Candida albicans
gcctgttatatcttctccagaagataagcaatctattgacgag

SEQ ID NO: 156 - DNA, 43 bp, Candida albicans
tcctggaagtatttaatatcgctttcgtatttgtcgcaaatgg

SEQ ID NO: 157 - DNA, 43 bp, Candida albicans
acaacactaatcataattctatgagatatctctaacacaacag

SEQ ID NO: 158 - DNA, 43 bp, Candida albicans
tcttgaaattgtcagagtcgaagtcacttaataattcaataga

SEQ ID NO: 159 - DNA, 43 bp, Candida albicans
actatcatgagtgatcttgttaaatcttctgaagtcattgaaa

SEQ ID NO: 160 - DNA, 43 bp, Candida albicans
ccaaattatttgctaatctctttggtaacaaagaaatgagaat

SEQ ID NO: 161 - DNA, 43 bp, Candida albicans
aattgttcaattcttctagtttagcgcgtccaacactgtgaat

SEQ ID NO: 162 - DNA, 43 bp, Candida albicans
ttaatcatgtcatacaataacggaggatataataatagaaacg

SEQ ID NO: 163 - DNA, 43 bp, Candida albicans
ctcaagttcctcatccagtgttcctcacaacaaagaagcctcg

SEQ ID NO: 164 - DNA, 43 bp, Candida albicans
cacaactcaatatatcatgatccctagaaatggacgactaata

SEQ ID NO: 165 - DNA, 43 bp, Candida albicans
tacacagttataaaccttgtaatatgaactctagacctgcacc

SEQ ID NO: 166 - DNA, 43 bp, Candida albicans
cttctttctatccaaatcataccatacaaatcaatagttcatt

SEQ ID NO: 167 - DNA, 43 bp, Candida albicans
cgacacacatcatatattaattatgaagttcactacactcgct

SEQ ID NO: 168 - DNA, 43 bp, Candida albicans
actctagtagtttataaatagtaatcgttacacatattctatc

SEQ ID NO: 169 - DNA, 43 bp, Candida albicans
ccttcattatcctagaaatacatcgtagcgaacaaccttaaca

SEQ ID NO: 170 - DNA, 43 bp, Candida albicans
ttatcatgccatcatcattagaaccatcatctaaattagctct

SEQ ID NO: 171 - DNA, 43 bp, Candida albicans
tggttaagaaagtacttctcattaatggtcccaatcttaattt

SEQ ID NO: 172 - DNA, 43 bp, Candida albicans
tgtcaaatccactcaaagtaatagatatttcagaagactcaat

SEQ ID NO: 173 - DNA, 43 bp, Candida albicans
cctaaataataaccaatagcaataataacaactaataacaaca

SEQ ID NO: 174 - DNA, 43 bp, Candida albicans
gatcaaacagttacactatgtccatcagaatcaactattgatg

SEQ ID NO: 175 - DNA, 43 bp, Candida albicans
ccaatcaacaattacaaatgtcagtaagatcaattgctaaagt

SEQ ID NO: 176 - DNA, 43 bp, Candida albicans
gattattaatcatttacatacttactcagtactgtacacttta

SEQ ID NO: 177 - DNA, 43 bp, Candida albicans
tggatgatgaagatttatatgatgaatttggtaattatatagg

SEQ ID NO: 178 - DNA, 43 bp, Candida albicans
accaccatcgaaatcaagcttcaacaatgtttaatttagtgac

SEQ ID NO: 179 - DNA, 43 bp, Candida albicans
tatagtacacgacatttcttatagtgacttcttgtaatggtcc

SEQ ID NO: 180 - DNA, 43 bp, Candida albicans
tacaacgccattcatacagataccaaatataaactaatagaac

SEQ ID NO: 181 - DNA, 43 bp, Candida albicans
aataagagaccaatccacagtggaacccttggtgctaaccata

SEQ ID NO: 182 - DNA, 43 bp, Candida albicans
cattacatttacatccacaatctttgctcttcaactataagta

SEQ ID NO: 183 - DNA, 43 bp, Candida albicans
tcaataatgggagttattgaaatcgagtcagaacaacagttca

SEQ ID NO: 184 - DNA, 43 bp, Candida albicans
caattatcgttcaataatactaacagttctattgctagaggtg

SEQ ID NO: 185 - DNA, 43 bp, Candida albicans
aacatcagttatcaaagataaatcattaacaacaaacaacaac

SEQ ID NO: 186 - DNA, 43 bp, Candida albicans
attataatcaacaatggttcaatcttccgtcttaggtttccca

SEQ ID NO: 187 - DNA, 43 bp, Candida albicans
atcttatcccatacaaacacaaccacatacatccaacttatta

SEQ ID NO: 188 - DNA, 43 bp, Candida albicans
ggagtaatctttaggtaaccatgggtagcatatttaaagatgg

SEQ ID NO: 189 - DNA, 43 bp, Candida albicans
tttgtttgctttctgatctagaagaattcaactcaacccagca

SEQ ID NO: 190 - DNA, 43 bp, Candida albicans
tcatacacaatgacaatcaccggtaaagcaacaacatacagtg

SEQ ID NO: 191 - DNA, 43 bp, Candida albicans
ttactttaccaaaaaaactctttgggagacgaattaaataaag

SEQ ID NO: 192 - DNA, 43 bp, Candida albicans
cacgttgaaataattcaccgagtacggtattcaacggcctcta

SEQ ID NO: 193 - DNA, 43 bp, Candida albicans
ataaagaaccaatttccataatggatcaacaagaagcacccat

SEQ ID NO: 194 - DNA, 43 bp, Candida albicans
agaaagcatgggcttgcattacctatattacctagttatgata

SEQ ID NO: 195 - DNA, 43 bp, Candida albicans
taataaggaatccttcatcaaacattagacaatttcagcaacc

SEQ ID NO: 196 - DNA, 43 bp, Candida albicans
tacactcaatcgccacacataacagaaatgactttaacgactc

SEQ ID NO: 197 - DNA, 43 bp, Candida albicans
gccaataagatttctaaagatgatatggaaatcgatgctgaat

SEQ ID NO: 198 - DNA, 43 bp, Candida albicans
caccagatgtctaatgttcagctgttgattggagacctcaatg

SEQ ID NO: 199 - DNA, 43 bp, Candida albicans
tattgaaattaatccaagtgatatttatcctgaatttgatggt

SEQ ID NO: 200 - DNA, 43 bp, Candida albicans
gattcattagtatttcaaccaattaaagttggtgataataccc

SEQ ID NO: 201 - DNA, 43 bp, Candida albicans
tctacaaatttgattgctttccttcaattacagtaacagcatc

SEQ ID NO: 202 - DNA, 43 bp, Candida albicans
gccatgaataaaggtactttattagaattgggtttattaccga

SEQ ID NO: 203 - DNA, 43 bp, Candida albicans
cagttgcttcaactaatactctactcctccattgaatgaagac

SEQ ID NO: 204 - DNA, 43 bp, Candida albicans
gaacatttaatgactttcacaatcaataatacaaattccacag

SEQ ID NO: 205 - DNA, 43 bp, Candida albicans
agaagtattagaaatccatgctctttctacaagttgtggaacc

SEQ ID NO: 206 - DNA, 43 bp, Candida albicans
atttgttactattataatgacaaccaaactgcgaaaccaacca

SEQ ID NO: 207 - DNA, 43 bp, Candida albicans
taataataatataataagaattaattaacaatgtcgtttccac

SEQ ID NO: 208 - DNA, 43 bp, Candida albicans
gcaagaagtagatgaggttgcaatgcaagcagccattgacgat

SEQ ID NO: 209 - DNA, 43 bp, Candida albicans
tttcttataatcaattaaaaaatatcttcatataactactata

SEQ ID NO: 210 - DNA, 43 bp, Candida albicans
agcgatggtgatacagaaactgccacaaactgctaatattcaa

SEQ ID NO: 211 - DNA, 43 bp, Candida albicans
aaatctccaaactcaatcacaactttctcgtcatgaaactact

SEQ ID NO: 212 - DNA, 43 bp, Candida albicans
attgctttgtgtgacggacttatttatgataccactgttgacg

SEQ ID NO: 213 - DNA, 43 bp, Candida albicans
cagttaataactttcttgctaacatttgctttaattgaggctt

SEQ ID NO: 214 - DNA, 43 bp, Candida albicans
ttccacgataactcattcaccaacgaaatggactcgccgacgt

SEQ ID NO: 215 - DNA, 43 bp, Candida albicans
ctgacaaccaatagagatgtcatccaacaattcccgattaaca

SEQ ID NO: 216 - DNA, 43 bp, Candida albicans
ttcacattccgatactaacagtgtgaatgatcaagctagttca

SEQ ID NO: 217 - DNA, 43 bp, Candida albicans
tgttaatcatctcagaattcaatcctcaattaatgcattcgga

SEQ ID NO: 218 - DNA, 43 bp, Candida albicans
taatttcaattgataaacaaattaaccaattaattaattaata

SEQ ID NO: 219 - DNA, 43 bp, Candida albicans
acctattacttcccttaatcaacaaacacatatacatacaaca

SEQ ID NO: 220 - DNA, 43 bp, Candida albicans
ccatccgctttatcatattaacccaataactccatgccagctt

SEQ ID NO: 221 - DNA, 43 bp, Candida albicans
atctgcaaccaaataatcaaacaacctacgaagaactataagt

SEQ ID NO: 222 - DNA, 43 bp, Candida albicans
aaataaaaagggtttatatcattatatacggatttttgaaatt

SEQ ID NO: 223 - DNA, 43 bp, Candida albicans
gacattctcttttgttctcaactatgtgcatagaactatagaa

SEQ ID NO: 224 - DNA, 43 bp, Candida albicans
ttcttaatttgatttctatcattgatcaatattaatatcaata

SEQ ID NO: 225 - DNA, 43 bp, Candida albicans
gcattatttaagatgtcgtttcgagccttgacaccagatttat

SEQ ID NO: 226 - DNA, 43 bp, Candida albicans
catcttaaatcctcctacaattaatttcataccaataaagaac

SEQ ID NO: 227 - DNA, 43 bp, Candida albicans
tcatttcctttctttcaagttgaattaatgatatagttataat

SEQ ID NO: 228 - DNA, 43 bp, Candida albicans
tttcccaattattcatacccattaattcatttattcaccaaat

SEQ ID NO: 229 - DNA, 43 bp, Candida albicans
aactattgaacccgtcaacaaattctatcaaaatatattaaag

SEQ ID NO: 230 - DNA, 43 bp, Candida albicans
aaaaaagagtttctacttaaaaaaaaagtaacttccttcaatc

SEQ ID NO: 231 - DNA, 43 bp, Candida albicans
gaatgataaatatctgacttgattacagattctttacttaata

SEQ ID NO: 232 - DNA, 43 bp, Candida albicans
cacaattgaaaaaaaaaaaagaaaatagactaaaactttaatt

SEQ ID NO: 233 - DNA, 43 bp, Candida albicans
ctccctcacatacatcatttgcattaagctagccacccaaaaa

SEQ ID NO: 234 - DNA, 43 bp, Candida albicans
aacaataattatttactttatttatcacaacccaaggctaact

SEQ ID NO: 235 - DNA, 43 bp, Candida albicans
agaggaaaatttatcacccaatacagaacaaattactggcatt

SEQ ID NO: 236 - DNA, 43 bp, Candida albicans
ttcgatcaacaaccagtattcctctttcatttatctttcttca

SEQ ID NO: 237 - DNA, 43 bp, Candida albicans
catatccaattgttctaacagaaaccaaatacaaacaataatt

SEQ ID NO: 238 - DNA, 43 bp, Candida albicans
cacaattagataactcaaacacacacttgtagtcatatttaaa

SEQ ID NO: 239 - DNA, 43 bp, Candida albicans
ttaacatttatgttgtgatttatattttcatttaaattcaaac

SEQ ID NO: 240 - DNA, 43 bp, Candida albicans
ctgtagttgtcaaattcatattcaccagcaccaagatatcatc

SEQ ID NO: 241 - DNA, 43 bp, Candida albicans
aaagcaaaacaaaaccaccctttactgaaacagtgaacccaac

SEQ ID NO: 242 - DNA, 43 bp, Candida albicans
cagttttgtttttcctgtcaaaaatatcgtttgtttgccttat

SEQ ID NO: 243 - DNA, 43 bp, Candida albicans
tctttccttccttattgaataataccagcaaaaccaatacatt

SEQ ID NO: 244 - DNA, 43 bp, Candida albicans
acgtatttattttactgaatccatcaagagtgtttcaacaacc

SEQ ID NO: 245 - DNA, 43 bp, Candida albicans
ttataaaccatgtcaataaaaagatctatttgtttacgtacta

SEQ ID NO: 246 - DNA, 43 bp, Candida albicans
tcagatcctcgataatattaacgacgactagctcattagcacc

SEQ ID NO: 247 - DNA, 43 bp, Candida albicans
taaagagatgagcatcaactgaaagctacaaaactgggctata

SEQ ID NO: 248 - DNA, 43 bp, Candida albicans
tacaagacctactcccccacctccatatttagtgaccgattca

SEQ ID NO: 249 - DNA, 43 bp, Candida albicans
tcaataaataagcaattacaactacaacagtttgactattcaa

SEQ ID NO: 250 - DNA, 43 bp, Candida albicans
cagcatacttgtatttctgacccattagcaacccaatttctat

SEQ ID NO: 251 - DNA, 43 bp, Candida albicans
tttactaattcctatttttaaataaatacacaaattaacgatc

SEQ ID NO: 252 - DNA, 43 bp, Candida albicans
attacgtttgttttgggagtaaactcttcaattacagaaaaac

SEQ ID NO: 253 - DNA, 43 bp, Candida albicans
cacttgatttaatatatatagatatacaacaacagtattaata

SEQ ID NO: 254 - DNA, 43 bp, Candida albicans
acctttggttgtattgatttaactactaaacatttttactaca

SEQ ID NO: 255 - DNA, 43 bp, Candida albicans
aggaagcttgaattgtcaatagatcaacaaatattcatagaca

SEQ ID NO: 256 - DNA, 43 bp, Candida albicans
ccatctcaaagttatatcttccctcctactactacttcccaat

SEQ ID NO: 257 - DNA, 43 bp, Candida albicans
aagaagtctctttagcaaacaacaaacaacaaacatatcaagt

SEQ ID NO: 258 - DNA, 43 bp, Candida albicans
cgtcagtattcatcataccaggaaagaaaattgatcaagaacg

SEQ ID NO: 259 - DNA, 43 bp, Candida albicans
ttaacacaccaacaccactaataataataacacataacacatt

SEQ ID NO: 260 - DNA, 43 bp, Candida albicans
tatatagatagatactcaaccctgatatcaaagtaccgtcaat

SEQ ID NO: 261 - DNA, 43 bp, Candida albicans
tatttcaagaaacaacatcatcctatcataaaacagcaacaca

SEQ ID NO: 262 - DNA, 43 bp, Candida albicans
ttcctttcgcttaaagactattacacgctaacttttgtcctcc

SEQ ID NO: 263 - DNA, 43 bp, Candida albicans
tcaaaaaatccaaaccgattttattaatgtgatttggccaatt

SEQ ID NO: 264 - DNA, 43 bp, Candida albicans
ctcgggttattcttaatcagtacacgtagaaatagagatagag

SEQ ID NO: 265 - DNA, 43 bp, Candida albicans
tatatatagacccacctatccaatcaaatacttttaaaaaaaa

SEQ ID NO: 266 - DNA, 43 bp, Candida albicans
aattacatatcaccacactctttaatttcacatttgctcccca

SEQ ID NO: 267 - DNA, 43 bp, Candida albicans
tcgatagtatttattttgaattcaacatttaaatatttcaatc

SEQ ID NO: 268 - DNA, 43 bp, Candida albicans
tttcctcatctcatactattttaacaaccataatacctatact

SEQ ID NO: 269 - DNA, 43 bp, Candida albicans
attaaaaccccccctcaacaccactcacatatattagaaaaca

SEQ ID NO: 270 - DNA, 43 bp, Candida albicans
atctaatacttgttctgtgaaaagcttttgggaaagggaaact

SEQ ID NO: 271 - DNA, 43 bp, Candida albicans
caaactttcattaatcaaacactaataataaacaaactcaaaa

SEQ ID NO: 272 - DNA, 43 bp, Candida albicans
attattaacaagttttatattaagaattggtttcattaatgca

SEQ ID NO: 273 - DNA, 43 bp, Candida albicans
aaatcaccagctctcaagtaatcgtgaacattcatgcacaatc

SEQ ID NO: 274 - DNA, 43 bp, Candida albicans
tgaaaggaaactatagcgcttagtacccctaatctacacaatc

SEQ ID NO: 275 - DNA, 43 bp, Candida albicans
tttcacctattaccatcaaccacattgcatatattatcttaca

SEQ ID NO: 276 - DNA, 43 bp, Candida albicans
acccattattattaaagatatacttcttattgaagatctggaa

SEQ ID NO: 277 - DNA, 43 bp, Candida albicans
ttagacagcacgaaccgcccaattatttcaccattcacctatt

SEQ ID NO: 278 - DNA, 43 bp, Candida albicans
tattacaataaacagcttttgaaattttttccccaacagttca

SEQ ID NO: 279 - DNA, 43 bp, Candida albicans
tcaatttgtagacataacaactgtttctagtgtcatcaaagcc

SEQ ID NO: 280 - DNA, 43 bp, Candida albicans
gcttggacttttactattttctttaattatcgttgtttctaca

SEQ ID NO: 281 - DNA, 43 bp, Candida albicans
attttaatactactccttctccattcattcacaactatacatt

SEQ ID NO: 282 - DNA, 43 bp, Candida albicans
tctttgtattattggttagatttccattccatatacacacaag

SEQ ID NO: 283 - DNA, 43 bp, Candida albicans
caattcctgcaactagtcatcaccaacatctatatctatatcg

SEQ ID NO: 284 - DNA, 43 bp, Candida albicans
ttttttttttttttttcaacatcctattcacaccacacccaaa

SEQ ID NO: 285 - DNA, 43 bp, Candida albicans
ttagacagtacaaaccgccaaattatttcaccattcacccatt

SEQ ID NO: 286 - DNA, 43 bp, Candida albicans
atatactctcaagctttacaataaccaaaacaaacaaactatc

SEQ ID NO: 287 - DNA, 43 bp, Candida albicans
gttcctaattaaagttttaaaaactactggcattctgtttata

SEQ ID NO: 288 - DNA, 43 bp, Candida albicans
tgacaattcgatattttctctgagagaaaaactatgtattatt

SEQ ID NO: 289 - DNA, 43 bp, Candida albicans
tatttattcattaccagtacttttgtgtttgtccattagaatc

SEQ ID NO: 290 - DNA, 43 bp, Candida albicans
agtactcaacgggcaacaacaaaattaaactttcactatcaat

SEQ ID NO: 291 - DNA, 43 bp, Candida albicans
tgcaccaattatgatgacggattatattacacatacattctaa

SEQ ID NO: 292 - DNA, 43 bp, Candida albicans
gtccatcttcaactcaacatccacaatcatcctttaatccact

SEQ ID NO: 293 - DNA, 43 bp, Candida albicans
ccaaatacactgttggactatcatcatcttattatccttagcc

SEQ ID NO: 294 - DNA, 43 bp, Candida albicans
ttctcagataactgttaattattcctacaccatatacttcaac

SEQ ID NO: 295 - DNA, 43 bp, Candida albicans
tcctggtagaggacaagtagtagttattaaagctcctcatata

SEQ ID NO: 296 - DNA, 43 bp, Candida albicans
catatatacatatacacatcttccacataaccaactcaacata

SEQ ID NO: 297 - DNA, 43 bp, Candida albicans
tttatcctgattaaaataattgatactacaaaaagtccagaat

SEQ ID NO: 298 - DNA, 43 bp, Candida albicans
atagtttattccctaatatcaatactaataaaaagaaagcaat

SEQ ID NO: 299 - DNA, 43 bp, Candida albicans
atctctttattcatttcaaatcaattgtgaatgacaatatatt

SEQ ID NO: 300 - DNA, 43 bp, Candida albicans
aaccaaccctctttataattaacaagactacaacttaataaaa

SEQ ID NO: 301 - DNA, 43 bp, Candida albicans
tcaactggaatacacacttcaacagtacatcaaccttgttgtc

SEQ ID NO: 302 - DNA, 43 bp, Candida albicans
gatatctcttcttataactgttatcaccaattatacttcaata

SEQ ID NO: 303 - DNA, 43 bp, Candida albicans
ttacaacaaacaacattactataagttataacagaggagttaa

SEQ ID NO: 304 - DNA, 43 bp, Candida albicans
cactataagtggtttttataatatcatatacttagaccacaaa

SEQ ID NO: 305 - DNA, 43 bp, Candida albicans
gaattttttttttcatttcatttctcaaccaagacagttgatc

SEQ ID NO: 306 - DNA, 43 bp, Candida albicans
aacgttcttatctccaagaaaattctgattctttgcaataaac

SEQ ID NO: 307 - DNA, 43 bp, Candida albicans
taattgttgtttagtgctactcgttaatgctcaatatattata

SEQ ID NO: 308 - DNA, 43 bp, Candida albicans
gcccaaatccctaacctgaatccacaataaatcaccaccaaaa

SEQ ID NO: 309 - DNA, 43 bp, Candida albicans
tgtgttaagttggatcccatatccattttacaaagtcagccat

SEQ ID NO: 310 - DNA, 43 bp, Candida albicans
caaccctccatcatatatatatatatacatattcatttaaaca

SEQ ID NO: 311-1000 - skipped (690 entries)

SEQ ID NO: 1001 - DNA, 43 bp, Candida albicans
tctcaatttattctactactatatacagaaagtccctcgaggt

SEQ ID NO: 1002 - DNA, 43 bp, Candida albicans
ttatattatatatatatatatatatataaaagtttcactctaa

SEQ ID NO: 1003 - DNA, 43 bp, Candida albicans
ttataagctctaggacattcaccttctggaccaatgaattctg

SEQ ID NO: 1004 - DNA, 43 bp, Candida albicans
aaaaatgaaagaaaacaaatcaacccagcaattttctatttgc

SEQ ID NO: 1005 - DNA, 43 bp, Candida albicans
aatataaatataaatataattatatatatctaaaaatatcatt

SEQ ID NO: 1006 - DNA, 43 bp, Candida albicans
tacttccttctcccaactatttcattctaaaatatagtttgat

SEQ ID NO: 1007 - DNA, 43 bp, Candida albicans
ctttagtttgaatttagattttgatgggtttctctaacaaatg

SEQ ID NO: 1008 - DNA, 43 bp, Candida albicans
ctatctatcaatcaatcaattttatcaattggttcgagttaaa

SEQ ID NO: 1009 - DNA, 43 bp, Candida albicans
tactttatcctttatcaattatcattatcattatcatgctgga

SEQ ID NO: 1010 - DNA, 43 bp, Candida albicans
atatttacaaaactgctacaaatctttggcaatttctttgaac

SEQ ID NO: 1011 - DNA, 43 bp, Candida albicans
ccaattttaaaagttcaatgatgacataataccataaccaatg

SEQ ID NO: 1012 - DNA, 43 bp, Candida albicans
caacactagcttcatcaatcaatttaattctcttctctttact

SEQ ID NO: 1013 - DNA, 43 bp, Candida albicans
taaatactaacttactttgcaaaagctttatcaaattcagtaa

SEQ ID NO: 1014 - DNA, 43 bp, Candida albicans
atttacctatacatatatagaatatatcttattctattctatt

SEQ ID NO: 1015 - DNA, 43 bp, Candida albicans
ataaaactatctatatatcaaagaaaaaaaaaaactagtctct

SEQ ID NO: 1016 - DNA, 43 bp, Candida albicans
attttgtgtagtcatatatattcatctaagtacttcctccatc

SEQ ID NO: 1017 - DNA, 43 bp, Candida albicans
aataaataaaacgttctgaaattatttcacattctttttaatc

SEQ ID NO: 1018 - DNA, 43 bp, Candida albicans
aaatatattaaactaaaagtacagctattaactctattacgaa

SEQ ID NO: 1019 - DNA, 43 bp, Candida albicans
caaaaacaaagcataccttgctgatacatgcaatgggatttta

SEQ ID NO: 1020 - DNA, 43 bp, Candida albicans
aggaaagaaatacaacaacaacaagagtgaccgcgtcaacagc

SEQ ID NO: 1021 - DNA, 43 bp, Candida albicans
acaactaacaatttatatataacaaaacttatattctaactat

SEQ ID NO: 1022 - DNA, 43 bp, Candida albicans
gttcctaagaaagaaatgaaagcgaaccgtgatagccactaca

SEQ ID NO: 1023 - DNA, 43 bp, Candida albicans
atcaaaatactacagctatacatagtttaaatggaagaagaca

SEQ ID NO: 1024 - DNA, 43 bp, Candida albicans
tataaataaaaaaaaaataacttttcttttgggatacagtcta

SEQ ID NO: 1025 - DNA, 43 bp, Candida albicans
aaacttatacataacgaactaactgtagtttaccttccttttt

SEQ ID NO: 1026 - DNA, 43 bp, Candida albicans
aaatgtatatgttctattttgtttcttccgtttgtgcgttgaa

SEQ ID NO: 1027 - DNA, 43 bp, Candida albicans
aataacaaaaataagctaatagaacttcattcccctatcttac

SEQ ID NO: 1028 - DNA, 43 bp, Candida albicans
tccttaaatccctaactctgtgtctatttaccaccattgattt

SEQ ID NO: 1029 - DNA, 43 bp, Candida albicans
atgttctattattattgtaatttatttttttcaaaaaaaaact

SEQ ID NO: 1030 - DNA, 43 bp, Candida albicans
gtctgtatgtctttattataaaattaatgttttgataccaatt

SEQ ID NO: 1031 - DNA, 43 bp, Candida albicans
ataaataatattttaaaaatgaaaaaacccgataaactgtaac

SEQ ID NO: 1032 - DNA, 43 bp, Candida albicans
gttgaagaattttccttgtcctccaaggttggattcgcaataa

SEQ ID NO: 1033 - DNA, 43 bp, Candida albicans
tactgaaaaaaaaaaattttaatagtacaataaagaaacattt

SEQ ID NO: 1034 - DNA, 43 bp, Candida albicans
tatacatctcacttcatttaataaatgtacatatacactgcaa

SEQ ID NO: 1035 - DNA, 43 bp, Candida albicans
tatattatatggacatatttctatttatatggtatcttttata

SEQ ID NO: 1036 - DNA, 43 bp, Candida albicans
gcaaaaaatatatacaatcatttcttttcatttctattcatca

SEQ ID NO: 1037 - DNA, 43 bp, Candida albicans
agcgtgagaaatggggaaacgcatttattagattctatataga

SEQ ID NO: 1038 - DNA, 43 bp, Candida albicans
gttctgatttaaaatatattaatattattatcacggagtctac

SEQ ID NO: 1039 - DNA, 43 bp, Candida albicans
atatttacaaattaaaagacgaaaagcaaaaagaacggactcc

SEQ ID NO: 1040 - DNA, 43 bp, Candida albicans
gtaggcgtttatttcctaattaagtaaacacaccttttttttt

SEQ ID NO: 1041 - DNA, 43 bp, Candida albicans
actaaaataaggatgttagtaatcaacggaatcttgaaaagaa

SEQ ID NO: 1042 - DNA, 43 bp, Candida albicans
aaagtatttatttacagataaccagttgttcatgaaaccactt

SEQ ID NO: 1043 - DNA, 43 bp, Candida albicans
agccctagacaaatataccacaaatcatatgacaattggtttc

SEQ ID NO: 1044 - DNA, 43 bp, Candida albicans
gataaacataaagaatctattattttatttacatattcatatt

SEQ ID NO: 1045 - DNA, 43 bp, Candida albicans
tttaatcaaatatatctatttcatttattctaatcatacaaac

SEQ ID NO: 1046 - DNA, 43 bp, Candida albicans
ctatgccagatatgtattaaatgtagtttttaatctaaacgtc

SEQ ID NO: 1047 - DNA, 43 bp, Candida albicans
gagtaatattgtaaagaatacctgtagtgtgttaccagtactt

SEQ ID NO: 1048 - DNA, 43 bp, Candida albicans
gaggaaggtaggacatggacaaggacatggactaataaatcat

SEQ ID NO: 1049 - DNA, 43 bp, Candida albicans
ttgcactggtgttgcaatttcgcgttttattactatctacctg

SEQ ID NO: 1050 - DNA, 43 bp, Candida albicans
agaactaaacagagtaatattatagtagtacaatgaaacttct

SEQ ID NO: 1051 - DNA, 43 bp, Candida albicans
aattacgaaatatttattgtagtatataaatgtatattatgca

SEQ ID NO: 1052 - DNA, 43 bp, Candida albicans
gaataccaattgtaaattaataacattaaaaatcctacttaaa

SEQ ID NO: 1053 - DNA, 43 bp, Candida albicans
tttaaatctaatatacattctaatttcaaatatccttttttac

SEQ ID NO: 1054 - DNA, 43 bp, Candida albicans
ataagtatatatgtataatatttatgagaaactatcacttctt

SEQ ID NO: 1055 - DNA, 43 bp, Candida albicans
aaaaccatacaaaaaaaaaacaatattaacaaccatcagcagt

SEQ ID NO: 1056 - DNA, 43 bp, Candida albicans
aacaggaataactatcgtgaatgacaacaacctcaaaaaaaaa

SEQ ID NO: 1057 - DNA, 43 bp, Candida albicans
ccatttgtattacaatcctaacttgtatacacaagctcatgaa

SEQ ID NO: 1058 - DNA, 43 bp, Candida albicans
tagtataaatatgagcataaagcagaaaaaaactgccatacaa

SEQ ID NO: 1059 - DNA, 43 bp, Candida albicans
aacgtttacttgtttaatatgctattgatatctatattttttt

SEQ ID NO: 1060 - DNA, 43 bp, Candida albicans
gcgattatcatagaattcatgtatctaattaataccaaacaat

SEQ ID NO: 1061 - DNA, 43 bp, Candida albicans
tatataaatgacgatggtatgcaaataacattaatcttgatta

SEQ ID NO: 1062 - DNA, 43 bp, Candida albicans
atgtattgtttttttttttgttttttttttcatttaaacctac

SEQ ID NO: 1063 - DNA, 43 bp, Candida albicans
cttcttggtcatatattattcgtttatagatcatcatacttct

SEQ ID NO: 1064 - DNA, 43 bp, Candida albicans
acaacaattaaatatatatacagatatattcctttattttttt

SEQ ID NO: 1065 - DNA, 43 bp, Candida albicans
gaatgagccccaaaataataacagaatcaccgtattaattcaa

SEQ ID NO: 1066 - DNA, 43 bp, Candida albicans
atatatcattagcaaagacagatggttatgctagcttgattaa

SEQ ID NO: 1067 - DNA, 43 bp, Candida albicans
cgtacatatctatgcctatcaatttgttcaacagttctaactc

SEQ ID NO: 1068 - DNA, 43 bp, Candida albicans
atatatgaatctataaaaccctcttaaaactaaaaaaaactct

SEQ ID NO: 1069 - DNA, 43 bp, Candida albicans
attaacatgatcattatcattatcattatcattatcattatca

SEQ ID NO: 1070 - DNA, 43 bp, Candida albicans
aacaaacaaacaaacaaacaaacaaacgtatacatatacacat

SEQ ID NO: 1071 - DNA, 43 bp, Candida albicans
gttttgcacccattagatcagaaactgtgctcaatttatcact

SEQ ID NO: 1072 - DNA, 43 bp, Candida albicans
taaaaaagtataaaataattagagaaaaaaaaaaagaactgaa

SEQ ID NO: 1073 - DNA, 43 bp, Candida albicans
tatatatacatgtcctgtctatctatctataacaattggcgta

SEQ ID NO: 1074 - DNA, 43 bp, Candida albicans
gggactttagttgacaacagcttgccatgtttggagctatcta

SEQ ID NO: 1075 - DNA, 43 bp, Candida albicans
ttttttattttcattttatttaatgaataagttttatctatat

SEQ ID NO: 1076 - DNA, 43 bp, Candida albicans
aaattatacacatttgtgcaaactaaatagatttatatacaag

SEQ ID NO: 1077 - DNA, 43 bp, Candida albicans
taaatagatgaatacactgtttttttttgtatatattgctcta

SEQ ID NO: 1078 - DNA, 43 bp, Candida albicans
ccgacttgtatcactatgtacacgtataaataaattaataact

SEQ ID NO: 1079 - DNA, 43 bp, Candida albicans
atatatatatatcatttcataacttcacacctcttccccttat

SEQ ID NO: 1080 - DNA, 43 bp, Candida albicans
tgtgtagaatatgagaattgaaacacgtctttcaaagattgtt

SEQ ID NO: 1081 - DNA, 43 bp, Candida albicans
tccatccaactaactaactaactagcaaacacatgaacacaca

SEQ ID NO: 1082 - DNA, 43 bp, Candida albicans
ccagtggggaagtgaaaaagaaaggaaaaacataaaacaaccc

SEQ ID NO: 1083 - DNA, 43 bp, Candida albicans
aaaaaaactgaagtgtcggaaatacttcatactgtaagtcaaa

SEQ ID NO: 1084 - DNA, 43 bp, Candida albicans
ctttctattattctatttacacgataaacttgaaagttatgac

SEQ ID NO: 1085 - DNA, 43 bp, Candida albicans
aagttataaattcatatttttccggatttattgatttcccata

SEQ ID NO: 1086 - DNA, 43 bp, Candida albicans
gagctgattcacaaaactcatgcaaatatatatatattattat

SEQ ID NO: 1087 - DNA, 43 bp, Candida albicans
atacaaaaagaaaaaatattagagtaaacaagaggttaattca

SEQ ID NO: 1088 - DNA, 43 bp, Candida albicans
tataagattttaaatccatccagtgtaattgtttattcgtaac

SEQ ID NO: 1089 - DNA, 43 bp, Candida albicans
atagagctactgataaattaactgctgttttatagatgtgtat

SEQ ID NO: 1090 - DNA, 43 bp, Candida albicans
attaccctctccattgtttttttttttttcattttctattaaa

SEQ ID NO: 1091 - DNA, 43 bp, Candida albicans
catttttattttattttttattttactttttatttattttttt

SEQ ID NO: 1092 - DNA, 43 bp, Candida albicans
tacaagattatatatatatcacatccactgttgttttcttttt

SEQ ID NO: 1093 - DNA, 43 bp, Candida albicans
tcgagatattgtacgtttattaaaaagtacaagacttggacta

SEQ ID NO: 1094 - DNA, 43 bp, Candida albicans
aaaccatacatgcatatcaaacgattggaatcttctttcattt

SEQ ID NO: 1095 - DNA, 43 bp, Candida albicans
taggaacaccaatttctcgtcaattgatttcgtggaaaattca

SEQ ID NO: 1096 - DNA, 43 bp, Candida albicans
tgttggtactgcatataaaacattccggattttggtcaaactt

SEQ ID NO: 1097 - DNA, 43 bp, Candida albicans
aacaaaggataaagtcaagtcataaaattggatttatactcgt

SEQ ID NO: 1098 - DNA, 43 bp, Candida albicans
tagttataaactttttatacaacaacataactcatcatctcat

SEQ ID NO: 1099 - DNA, 43 bp, Candida albicans
cttttatgcattctatacattaatatagtcctgtttcacattc

SEQ ID NO: 1100 - DNA, 43 bp, Candida albicans
atgtacatacaaacaatctatacaacctgtataatcttctagt

SEQ ID NO: 1101 - DNA, 43 bp, Candida albicans
gcctattagggcgcaattatttatttattttttttttatgccc

SEQ ID NO: 1102 - DNA, 43 bp, Candida albicans
ttacatatagatatatgtatatgaataaacactttggtggtca

SEQ ID NO: 1103 - DNA, 43 bp, Candida albicans
aagggcattaaattgaaatattggaattttcatgttagtctct

SEQ ID NO: 1104 - DNA, 43 bp, Candida albicans
tctagacagatagaacccctccagctaaattataaaactttct

SEQ ID NO: 1105 - DNA, 43 bp, Candida albicans
caatttattaggttgagtttgattgggttgggttgggtttgcc

SEQ ID NO: 1106 - DNA, 43 bp, Candida albicans
tatttaatgttttgtctataatttacataataattttgtctat

SEQ ID NO: 1107 - DNA, 43 bp, Candida albicans
aaaaactacatttaatacatatctggcatagacttaaaaaaaa

SEQ ID NO: 1108 - DNA, 43 bp, Candida albicans
aagaggggagactatttacaaaatatagtatgatttgctttta

SEQ ID NO: 1109 - DNA, 43 bp, Candida albicans
aatcatatacattttattatacatctatacagataagattgtt

SEQ ID NO: 1110 - DNA, 43 bp, Candida albicans
tttatgtacgagtgatgcgtaattatgttacatgaaatttctt

SEQ ID NO: 1111 - DNA, 43 bp, Candida albicans
tagaactacttataaaatacaaacatacggtatttgacaattt

SEQ ID NO: 1112 - DNA, 43 bp, Candida albicans
gaggcccagttatgccacaacagccaagaccgggcaactggga

SEQ ID NO: 1113 - DNA, 43 bp, Candida albicans
gaaaaaaaaaaaaatgagaagctgaacattgaaacgcaattgc

SEQ ID NO: 1114 - DNA, 43 bp, Candida albicans
tgttgtatatactccagttttttgactgttacatatactagac

SEQ ID NO: 1115 - DNA, 43 bp, Candida albicans
ttatattatacaaaactagtgtgtactccaaatacacaagact

SEQ ID NO: 1116 - DNA, 43 bp, Candida albicans
agccatatttcaatgtttatttatattttacacacatcgtaag

SEQ ID NO: 1117 - DNA, 43 bp, Candida albicans
acacataaatgtacttatatatagttacacggaaaactttctt

SEQ ID NO: 1118 - DNA, 43 bp, Candida albicans
tatatgataatctaaacataaataaataaaataccaccaacac

SEQ ID NO: 1119 - DNA, 43 bp, Candida albicans
atgaggaaggtgtttgcgatgcttttgtgaaactagccgcttc

SEQ ID NO: 1120 - DNA, 43 bp, Candida albicans
attttgcaagaaaagtactggaaaaaaaagactcgcatatatt

SEQ ID NO: 1121 - DNA, 43 bp, Candida albicans
ggaataaatccgatttcgctacacgacctactacttacacact

SEQ ID NO: 1122 - DNA, 43 bp, Candida albicans
ctgttttttactgcaaaaaaattgacaaatagactatacacac

SEQ ID NO: 1123 - DNA, 43 bp, Candida albicans
tacttgtatactatttgtaatgataaaattattatttatttat

SEQ ID NO: 1124 - DNA, 43 bp, Candida albicans
tagttttttattattaaatttcatcactttgacgaccaattac

SEQ ID NO: 1125 - DNA, 43 bp, Candida albicans
attaatagtctattcaaagaattctaataaatattagcttgaa

SEQ ID NO: 1126 - DNA, 43 bp, Candida albicans
gtacttacaagatatgtgcttctctatatttggaacaatctct

SEQ ID NO: 1127 - DNA, 43 bp, Candida albicans
aacttagaaaagagggtttaatatttgtttaacttgagaagtc

SEQ ID NO: 1128 - DNA, 43 bp, Candida albicans
atttagggtcgttaagtgactaatcactaattacatctttggt

SEQ ID NO: 1129 - DNA, 43 bp, Candida albicans
gtatgagaaggtaatgttgtatattttttagtacataactagt

SEQ ID NO: 1130 - DNA, 43 bp, Candida albicans
tgcatttcaagtggaagaacgagagaaaacgctgagtatgtat

SEQ ID NO: 1131 - DNA, 43 bp, Candida albicans
actttatacagcaacttcttcaattttaacataccatcgatca

SEQ ID NO: 1132 - DNA, 43 bp, Candida albicans
atatttatgacatagttatttataaatgcataaaaatgtgaat

SEQ ID NO: 1133 - DNA, 43 bp, Candida albicans
aacacagctttttggcatatgttaactatgagcttttactctc

SEQ ID NO: 1134 - DNA, 43 bp, Candida albicans
taggtaaaagacgcttgactttacattgaatctataacttaaa

SEQ ID NO: 1135 - DNA, 43 bp, Candida albicans
tgctctaccaatacttcataccaactcaatcgtttatattaca

SEQ ID NO: 1136 - DNA, 43 bp, Candida albicans
aaaatctataatctatgatttatctaaacatgaatctctgtct

SEQ ID NO: 1137 - DNA, 43 bp, Candida albicans
tttctttaattataactacctacctaacaactgactacttctt

SEQ ID NO: 1138 - DNA, 43 bp, Candida albicans
attccatggcggcatcttctaatgggatttcatcggcatattc

SEQ ID NO: 1139 - DNA, 43 bp, Candida albicans
aagctttaacccaatcaactggaccctgaagaagatccttgac

SEQ ID NO: 1140 - DNA, 43 bp, Candida albicans
cttaattaatacacatataagttacacatcagttaatcttgcc

SEQ ID NO: 1141 - DNA, 43 bp, Candida albicans
cagaactaggaatacttctagaatccaaagggattatctggtg

SEQ ID NO: 1142 - DNA, 43 bp, Candida albicans
ttattagcatattaaacaaatttaactaattgggcaatgccag

SEQ ID NO: 1143 - DNA, 43 bp, Candida albicans
cacatgtgtgactattggcatttattaacacgcgcaatgacgt

SEQ ID NO: 1144 - DNA, 43 bp, Candida albicans
accttagttgtactaaccatttcttgaacattctacataattg

SEQ ID NO: 1145 - DNA, 43 bp, Candida albicans
catcttaaagggaaagcatggcccacacttacaacttggcata

SEQ ID NO: 1146 - DNA, 43 bp, Candida albicans
tgggataaatctactcttcatagtcttccagtaaagctttata

SEQ ID NO: 1147 - DNA, 43 bp, Candida albicans
cacccaaggctgtagtcaataccataccaggaacaaccaatac

SEQ ID NO: 1148 - DNA, 43 bp, Candida albicans
gttcaaacaaagaatcaatggaactttcatctggatcaacttc

SEQ ID NO: 1149 - DNA, 43 bp, Candida albicans
caatcgtatgaagcatctgcttaggtaaacctgaccaaatgta

SEQ ID NO: 1150 - DNA, 43 bp, Candida albicans
gtaataatctaactttattaggccaaactttcccatcaccaag

SEQ ID NO: 1151 - DNA, 43 bp, Candida albicans
gggtcctatttattatacttaccttcaaagaatatttactctc

SEQ ID NO: 1152 - DNA, 43 bp, Candida albicans
ctttctctttagcttgcaagtataaatcgtcccgcttggaatt

SEQ ID NO: 1153 - DNA, 43 bp, Candida albicans
gcttcttgttgtaaatatttctttacttgattaacggtatatt

SEQ ID NO: 1154 - DNA, 43 bp, Candida albicans
ctttcagcttaacctacctacatatcttctggacagttctcgt

SEQ ID NO: 1155 - DNA, 43 bp, Candida albicans
ttaagagaactttaccaagatgcgtttatttctttatataagt

SEQ ID NO: 1156 - DNA, 43 bp, Candida albicans
cctactttcctaaagaagttatactcaaaccttgcatttgtgc

SEQ ID NO: 1157 - DNA, 43 bp, Candida albicans
ctttgcattagtagtcttggtactaccattcgtattatcattt

SEQ ID NO: 1158 - DNA, 43 bp, Candida albicans
ttgcgctcaatacaatttctctttcagtactactattgttgaa

SEQ ID NO: 1159 - DNA, 43 bp, Candida albicans
cacaatttcaccatcggatgaatcttcactactaccttccaaa

SEQ ID NO: 1160 - DNA, 43 bp, Candida albicans
taacttaatttaatttgacttaacttaacttaacttaatccat

SEQ ID NO: 1161 - DNA, 43 bp, Candida albicans
actttatttaatcactttctatatccattacatcttcatcatc

SEQ ID NO: 1162 - DNA, 43 bp, Candida albicans
ttatacataccaatacctctagcagcaacgtcagttgcaacca

SEQ ID NO: 1163 - DNA, 43 bp, Candida albicans
gtatatactaataaacacaatacaagaattaaactactcgata

SEQ ID NO: 1164 - DNA, 43 bp, Candida albicans
ggcaagaaacaaataacaaatactatttacaattagagctaaa

SEQ ID NO: 1165 - DNA, 43 bp, Candida albicans
atattagcttattccacaattctagatacctataaccctcctc

SEQ ID NO: 1166 - DNA, 43 bp, Candida albicans
ctgtagcccttctggtgtttaatcaacttcttccatagcagat

SEQ ID NO: 1167 - DNA, 43 bp, Candida albicans
tacccaaatatatatgtaacaaacgtataatcattttcctcaa

SEQ ID NO: 1168 - DNA, 43 bp, Candida albicans
cagttctaacttcattctaattgtctatacttcgattccagat

SEQ ID NO: 1169 - DNA, 43 bp, Candida albicans
tttcaatagacttgtcttcacgctgtaaccagttctttaattt

SEQ ID NO: 1170 - DNA, 43 bp, Candida albicans
taataaccatagtttattcatatttataactgactgatgtacc

SEQ ID NO: 1171 - DNA, 43 bp, Candida albicans
tgtaccgtctagtagttcaacgcatattcaatggctgccgtgt

SEQ ID NO: 1172 - DNA, 43 bp, Candida albicans
agatggatactacattatacacaacccaagggtggtaacaact

SEQ ID NO: 1173 - DNA, 43 bp, Candida albicans
tggtcttacatttaattaacggtatggagcatcagcatcaata

SEQ ID NO: 1174 - DNA, 43 bp, Candida albicans
cacaatactattaattattctgtgatttaacaaatgtccctct

SEQ ID NO: 1175 - DNA, 43 bp, Candida albicans
caattaagttatatatctatagaactataaagtttgtcttatt

SEQ ID NO: 1176 - DNA, 43 bp, Candida albicans
ttcacaaacacgatcagaactagtagcatcttcaataccttta

SEQ ID NO: 1177 - DNA, 43 bp, Candida albicans
attacaattgtagtttcactcatactcctatacatctctttat

SEQ ID NO: 1178 - DNA, 43 bp, Candida albicans
agaaatacgcgaacagagatgtatgacacgccctttatttcga

SEQ ID NO: 1179 - DNA, 43 bp, Candida albicans
aatccatttcctgtacttcaaacgtccaatgaccatttgtagg

SEQ ID NO: 1180 - DNA, 43 bp, Candida albicans
gctatactgaacatctcgattagaacttctttctcttcccgat

SEQ ID NO: 1181 - DNA, 43 bp, Candida albicans
aatattcattgagatcgctatttcagtactctgatgaacactc

SEQ ID NO: 1182 - DNA, 43 bp, Candida albicans
ggaaattcgggagtttcataaacattactcttcttctgaactt

SEQ ID NO: 1183 - DNA, 43 bp, Candida albicans
gtaaattatacaaataatatctccaaggacatttaataaatca

SEQ ID NO: 1184 - DNA, 43 bp, Candida albicans
ctctaagcatcgtaagtagttgaagaaacatcaccacctctac

SEQ ID NO: 1185 - DNA, 43 bp, Candida albicans
attgcataaattgctttgtagtttcttaattgtcttgcaccaa

SEQ ID NO: 1186 - DNA, 43 bp, Candida albicans
gattagtatttagctctgaattctttggcagcttcaaccatat

SEQ ID NO: 1187 - DNA, 43 bp, Candida albicans
tattaacaaatacatatcaatgtttgactgcaaatagtacaaa

SEQ ID NO: 1188 - DNA, 43 bp, Candida albicans
ggcaacttgctagatttcaggctgctgattaaatggagatttg

SEQ ID NO: 1189 - DNA, 43 bp, Candida albicans
cgaattcttaacaagatcggtatcaaatttgaacttatcactt

SEQ ID NO: 1190 - DNA, 43 bp, Candida albicans
tacaaaccaatttgatatttcttactcatagataaccacttgt

SEQ ID NO: 1191 - DNA, 43 bp, Candida albicans
caaatcaataaatttagtagattctaaatgatggacccatggt

SEQ ID NO: 1192 - DNA, 43 bp, Candida albicans
tggagttacgaattatatacaagtaggtgggtactcccaatct

SEQ ID NO: 1193 - DNA, 43 bp, Candida albicans
gggataacgtggttgtgtgtttcaactactggtggtcgttaca

SEQ ID NO: 1194 - DNA, 43 bp, Candida albicans
cactttacttataatgcagttgtaacagttacggtttgcgaat

SEQ ID NO: 1195 - DNA, 43 bp, Candida albicans
tcttgaaatatacatgtaattcaatcatcattatgtgtgggta

SEQ ID NO: 1196 - DNA, 43 bp, Candida albicans
gcaaggaggacacgtttccaaataatctataacctacctaaat

SEQ ID NO: 1197 - DNA, 43 bp, Candida albicans
ttatttcttccctctcttcaattgttcgatttcacgataagct

SEQ ID NO: 1198 - DNA, 43 bp, Candida albicans
tacacaataattacataactctccaattgtctagtctcattcg

SEQ ID NO: 1199 - DNA, 43 bp, Candida albicans
cgactttgagcacatccatagtgaactacttcatggtctttgg

SEQ ID NO: 1200 - DNA, 43 bp, Candida albicans
cctacaatctagcttcatcgatattgccaatgactttaggaaa

SEQ ID NO: 1201 - DNA, 43 bp, Candida albicans
tggaaattgatgaacagacaatcatagtagttacactaagaat

SEQ ID NO: 1202 - DNA, 43 bp, Candida albicans
cttcttctttataaatgtttgtctatatgttatacatttattg

SEQ ID NO: 1203 - DNA, 43 bp, Candida albicans
tcttatttcagtaactgcatcaataaccttatcaaatatttct

SEQ ID NO: 1204 - DNA, 43 bp, Candida albicans
atcagtgatattgtatgataattcttctaatacatgtttaata

SEQ ID NO: 1205 - DNA, 43 bp, Candida albicans
ctaatgatatccgaggcaccaccggattataaatgatcgtcaa

SEQ ID NO: 1206 - DNA, 43 bp, Candida albicans
atacattaacaatgaaatcaggtaaacaatcggtaatccattt

SEQ ID NO: 1207 - DNA, 43 bp, Candida albicans
atgcaggatcgtcatctaccctttcctccaatgattagcgaaa

SEQ ID NO: 1208 - DNA, 43 bp, Candida albicans
ctagtactttacctcaactatcatcaacattggaatgtttcct

SEQ ID NO: 1209 - DNA, 43 bp, Candida albicans
gttcaatctaatcatcattcaatctgaatatcattcatttaac

SEQ ID NO: 1210 - DNA, 43 bp, Candida albicans
ttgtctcaattcacccgagctctatttatcgagtttagttctc

SEQ ID NO: 1211 - DNA, 43 bp, Candida albicans
tgtacaactccacttatgcccagccaatcaattgttcataata

SEQ ID NO: 1212 - DNA, 43 bp, Candida albicans
caaatctttagccaagcccaaaccaatgtgtctggcaactgtc

SEQ ID NO: 1213 - DNA, 43 bp, Candida albicans
ggtaactaacaatcccagcaagttaagcccatgtttgtaattg

SEQ ID NO: 1214 - DNA, 43 bp, Candida albicans
tatagcaacactcgctgcctccaccgtcttgataccacaaatc

SEQ ID NO: 1215 - DNA, 43 bp, Candida albicans
aatagtcgagtgggtacaaacattgaatatataaatacactgc

SEQ ID NO: 1216 - DNA, 43 bp, Candida albicans
taaagtagaataggagaagaataaatttcatagaacacaaatc

SEQ ID NO: 1217 - DNA, 43 bp, Candida albicans
aaccaggtcttattcaatgcactaacggtacgactatcataat

SEQ ID NO: 1218 - DNA, 43 bp, Candida albicans
ataacacagaataatataacaactacgctgttcgtagtattta

SEQ ID NO: 1219 - DNA, 43 bp, Candida albicans
tctaaatcttcttcaatttccataaacccattatcagaaccac

SEQ ID NO: 1220 - DNA, 43 bp, Candida albicans
taattccacttatatagaatagaatagttcagtatactactac

SEQ ID NO: 1221 - DNA, 43 bp, Candida albicans
ggaaatttgtatttatacaactacgtatactctagtatcatga

SEQ ID NO: 1222 - DNA, 43 bp, Candida albicans
taacatcaattctaaaaagcaattattgttgattggaacttgt

SEQ ID NO: 1223 - DNA, 43 bp, Candida albicans
ataaaataatacttcctagtagttactataatatacatactct

SEQ ID NO: 1224 - DNA, 43 bp, Candida albicans
tatatatttaaaaaaaacgtatacatttatcattctcttcttt

SEQ ID NO: 1225 - DNA, 43 bp, Candida albicans
aactatttgacgtttgtattaattatgtaacaccttcttctat

SEQ ID NO: 1226 - DNA, 43 bp, Candida albicans
atagtttacattctatatatattattttcctacaaaaaaaaat

SEQ ID NO: 1227 - DNA, 43 bp, Candida albicans
tatttattaacttttattgttgttgttttcgtcatgaattgta

SEQ ID NO: 1228 - DNA, 43 bp, Candida albicans
atagtgtaacagggtagtattattgacgtaccaaagaagatca

SEQ ID NO: 1229 - DNA, 43 bp, Candida albicans
agaccattaaacttaattataattaaattgacccactactcct

SEQ ID NO: 1230 - DNA, 43 bp, Candida albicans
gctaacagcatgaaaaaaaaaaagtagtaaaaagttcatataa

SEQ ID NO: 1231 - DNA, 43 bp, Candida albicans
caatagcaatacagaaaaaaaaaacacattacaagtatttttt

SEQ ID NO: 1232 - DNA, 43 bp, Candida albicans
acacatacatatacaactaaatgtgagagtataaagttcacgt

SEQ ID NO: 1233 - DNA, 43 bp, Candida albicans
tgtataatttatgttcatgtgtatataaatttgttgattattt

SEQ ID NO: 1234 - DNA, 43 bp, Candida albicans
ctctttctttttttatacataataaaaaataacttaagctaac

SEQ ID NO: 1235 - DNA, 43 bp, Candida albicans
cttttctcttttttatatttttttatttttaactatctgatgt

SEQ ID NO: 1236 - DNA, 43 bp, Candida albicans
gaggaattgtattccaaaaaaataaagtgtaccaccatattta

SEQ ID NO: 1237 - DNA, 43 bp, Candida albicans
tctctaatataactgggcggtagttacacgtattttgtttcat

SEQ ID NO: 1238 - DNA, 43 bp, Candida albicans
aaatagaaaaaataaacactataacagtcagtgagtttctttt

SEQ ID NO: 1239 - DNA, 43 bp, Candida albicans
atactaatactgttaccttgtgtggtggggagttgactatggt

SEQ ID NO: 1240 - DNA, 43 bp, Candida albicans
aaatgatccatctttgtcaacttacaaagaataaataccccta

SEQ ID NO: 1241 - DNA, 43 bp, Candida albicans
tttatttctacaatggatatatatgtaacaatagagacggttg

SEQ ID NO: 1242 - DNA, 43 bp, Candida albicans
aattaaattttatgaaccttagcaataatttgtttattctata

SEQ ID NO: 1243 - DNA, 43 bp, Candida albicans
ttaaaaatacaaaattaaatataaattacaagataaattaata

SEQ ID NO: 1244 - DNA, 43 bp, Candida albicans
atgatggtgggaaatatatatatgtaaaatatgacactcagac

SEQ ID NO: 1245 - DNA, 43 bp, Candida albicans
tcaaaaattagtccaacttcatccttattaatagtgtagttat

SEQ ID NO: 1246 - DNA, 43 bp, Candida albicans
cagtttattacttgtatgtatgtacatatatggtcttctccta

SEQ ID NO: 1247 - DNA, 43 bp, Candida albicans
gctcctaagaattgatatttatatatgtatactattgtacgtt

SEQ ID NO: 1248 - DNA, 43 bp, Candida albicans
tttaaaagtcttataatgactctttctctctctctatttctct

SEQ ID NO: 1249 - DNA, 43 bp, Candida albicans
cacacatttctacacttcttctactctgtagtctattctaata

SEQ ID NO: 1250 - DNA, 43 bp, Candida albicans
gttgattcttaattattttgtttccaatatctgtcatcatatt

SEQ ID NO: 1251 - DNA, 43 bp, Candida albicans
aatcttgtaaaaagcaccagcagcagcagtaacaacatactgt

SEQ ID NO: 1252 - DNA, 43 bp, Candida albicans
ttacgttaaattatggataaatttgttcttcttttgttactat

SEQ ID NO: 1253 - DNA, 43 bp, Candida albicans
taaatatttaaataatttaattttaaaacgtgacttgtttaat

SEQ ID NO: 1254 - DNA, 43 bp, Candida albicans
aatagttaaattagataatgtattgttgttgttgttttttttt

SEQ ID NO: 1255 - DNA, 43 bp, Candida albicans
gaataagttgtcaatgaacagatttggttcaaatcttcccatt

SEQ ID NO: 1256 - DNA, 43 bp, Candida albicans
gttacaaatcatattaataattacagaaaacttgttctccctt

SEQ ID NO: 1257 - DNA, 43 bp, Candida albicans
ttgaccttctcatcttcttcctcctcctcctcctcttacttac

SEQ ID NO: 1258 - DNA, 43 bp, Candida albicans
atatttacatcgacaaaactatttacatttcgaaaataaagaa

SEQ ID NO: 1259 - DNA, 43 bp, Candida albicans
tgaaagtaataaaatgcttttgtttttgtttttgttttcttct

SEQ ID NO: 1260 - DNA, 43 bp, Candida albicans
tattaaatgataactatgtacagtaaaatttacattaactttt

SEQ ID NO: 1261 - DNA, 43 bp, Candida albicans
cacaccgtcaaacagagcaatggacagtttatggttaacataa

SEQ ID NO: 1262 - DNA, 43 bp, Candida albicans
attaatagatacatatacatatataattcgttcatacaaacaa

SEQ ID NO: 1263 - DNA, 43 bp, Candida albicans
actactaaaagctttatctttctaggatcatctctcaagggga

SEQ ID NO: 1264 - DNA, 43 bp, Candida albicans
attcttgtccttgtgtgagacatatattgtcgtaaagataatc

SEQ ID NO: 1265 - DNA, 43 bp, Candida albicans
atgaaggtaagctcaaagaaagattttattttatcatcaattc

SEQ ID NO: 1266 - DNA, 43 bp, Candida albicans
aacaaaggtggatgtgcgaggacgccatcgcaatagtagtgtg

SEQ ID NO: 1267 - DNA, 43 bp, Candida albicans
tccttccttccatgcactacatgttccgctttagatattacac

SEQ ID NO: 1268 - DNA, 43 bp, Candida albicans
caagttgagctatatctatttacaaatactatatcatatttaa

SEQ ID NO: 1269 - DNA, 43 bp, Candida albicans
ctcattaattcagactttctgtcatttactctcaagtacccga

SEQ ID NO: 1270 - DNA, 43 bp, Candida albicans
agaaagaaaacttactataatatatatttacaggtacggtaat

SEQ ID NO: 1271 - DNA, 43 bp, Candida albicans
tctattatgtaatatctattatataatatcaattgtgtttaga

SEQ ID NO: 1272 - DNA, 43 bp, Candida albicans
tccagaagtgtaggccagaagttcttgtaggagacctaaagac

SEQ ID NO: 1273 - DNA, 43 bp, Candida albicans
tctatgcagtctcggattaaatctacttatcctataaaccacg

SEQ ID NO: 1274 - DNA, 43 bp, Candida albicans
aaaaaatcatattatattatcctgcaataggtttttattaata

SEQ ID NO: 1275 - DNA, 43 bp, Candida albicans
agcggaactatgtacaaatcaactgggactaaatccgtgaaac

SEQ ID NO: 1276 - DNA, 43 bp, Candida albicans
aaaacatctagagccaacgtaaatctccataaatgcagtctac

SEQ ID NO: 1277 - DNA, 43 bp, Candida albicans
acttctctgtttcctctattgtttacacaaacttccacgccac

SEQ ID NO: 1278 - DNA, 43 bp, Candida albicans
ttatcattatccctatcattgtcatttccaatgtcaatttcat

SEQ ID NO: 1279 - DNA, 43 bp, Candida albicans
cattaatatacaccaagaagagacagacaaccaacggcttcct

SEQ ID NO: 1280 - DNA, 43 bp, Candida albicans
taatcgtctataacgacttattaggaaataaatgacccgtgca

SEQ ID NO: 1281 - DNA, 43 bp, Candida albicans
atgaatgattatataaatccctcttttctctcaacttatagcc

SEQ ID NO: 1282 - DNA, 43 bp, Candida albicans
agtgagttgatgtagtaaattatgtatgaatgtatataaaccc

SEQ ID NO: 1283 - DNA, 43 bp, Candida albicans
taattctatctatttaagtctaataccaccgaactcccaaaaa

SEQ ID NO: 1284 - DNA, 43 bp, Candida albicans
ttaactcgtgagtataatgaattagtagcatagtaatatacac

SEQ ID NO: 1285 - DNA, 43 bp, Candida albicans
acttctctgtttcctttattgcttacacaaacttccacaccac

SEQ ID NO: 1286 - DNA, 43 bp, Candida albicans
gctactgaacaaacatacacaactacaaaaaaaaaaagagcac

SEQ ID NO: 1287 - DNA, 43 bp, Candida albicans
attatatttactgctgcgtatacatagtgtgaatatatattta

SEQ ID NO: 1288 - DNA, 43 bp, Candida albicans
attaaagattctattcaagattaatattcatgtacatagagga

SEQ ID NO: 1289 - DNA, 43 bp, Candida albicans
gaactgtggttggttggttgactggctagtttgttgtctgcga

SEQ ID NO: 1290 - DNA, 43 bp, Candida albicans
taaatatacacatttcggtacataattttgcttaaacagaaag

SEQ ID NO: 1291 - DNA, 43 bp, Candida albicans
gacagtgatgaagaagactagatacaagaaagtgtattatttt

SEQ ID NO: 1292 - DNA, 43 bp, Candida albicans
taactgaggagagacaatgccattactggaaatgttgctattt

SEQ ID NO: 1293 - DNA, 43 bp, Candida albicans
tgtatatatatatattatattgttagcatttttttttggtggt

SEQ ID NO: 1294 - DNA, 43 bp, Candida albicans
ttttaatcattaatattaatatgcgtacattttaaatctacat

SEQ ID NO: 1295 - DNA, 43 bp, Candida albicans
taataaagacattacattatatgatttactgagagatgtcgaa

SEQ ID NO: 1296 - DNA, 43 bp, Candida albicans
caactatgcaatattcattcatatctaacctccttttgttatt

SEQ ID NO: 1297 - DNA, 43 bp, Candida albicans
tatcatttgtgaatacatctatacgtttctataaacatgcaac

SEQ ID NO: 1298 - DNA, 43 bp, Candida albicans
acaagtgttgctatatacatgatagtatgcattgtaatgtaaa

SEQ ID NO: 1299 - DNA, 43 bp, Candida albicans
caaaaatcacagcattaaatatgtgatcctaataaatcaattt

SEQ ID NO: 1300 - DNA, 43 bp, Candida albicans
tctgattattactatttgactatcttcttcaattcttttactt

SEQ ID NO: 1301 - DNA, 43 bp, Candida albicans
tgtaaaaaattggttgaaccttttaaataaccatctcgttgtt

SEQ ID NO: 1302 - DNA, 43 bp, Candida albicans
taataaataaatatcaattaatacacaatagttaacgtcttct

SEQ ID NO: 1303 - DNA, 43 bp, Candida albicans
gtactaatacttgaaaaatctgctttgctgctttgtttgaggt

SEQ ID NO: 1304 - DNA, 43 bp, Candida albicans
taaatttgtataaagaaaagaatatatatatgttctacttaac

SEQ ID NO: 1305 - DNA, 43 bp, Candida albicans
gaaaatgaactttatataggctagtattactcgggtattatat

SEQ ID NO: 1306 - DNA, 43 bp, Candida albicans
gaaaaatgcgtttgaccagaaaacctattgagaaatcacccaa

SEQ ID NO: 1307 - DNA, 43 bp, Candida albicans
ttttgtttaatactatattatctaagatctaaatagatgtcgt

SEQ ID NO: 1308 - DNA, 43 bp, Candida albicans
aatttaaatacacatacacatagttatacctattagatttata

SEQ ID NO: 1309 - DNA, 43 bp, Candida albicans
tatatggcaaaaaattacgtttggatcggtttttcttcatttt

SEQ ID NO: 1310 - DNA, 43 bp, Candida albicans
ggcaaaacaatattctcttgtcatttacatacaattgtcaaat

SEQ ID NO: 1311-2000 - skipped (690 entries)

SEQ ID NO: 2001 - DNA, 65 bp, Candida albicans
tcagtcaactccaacggtaacagctgtagtgcagcagctcgtcaactggacggttgatgtagtgg

SEQ ID NO: 2002 - DNA, 65 bp, Candida albicans
aattcaattcaattcaattaagcaatgcgtttggtttggtagtccacgcattttttgttgttgag

SEQ ID NO: 2003 - DNA, 65 bp, Candida albicans
cgtttatcttagttaatctttttttctattatctattactacaacacatatccgagttttcaatc

SEQ ID NO: 2004 - DNA, 65 bp, Candida albicans
ctttctttaacccaataatttagaactgcaaaatcatacttatatcaacctaatttatttcctcc

SEQ ID NO: 2005 - DNA, 65 bp, Candida albicans
catttcacttcacttcatttatttattatattaattggttttattttcattcattgatttggagt

SEQ ID NO: 2006 - DNA, 65 bp, Candida albicans
gaattattccaaaactattcttatcaccatttgaagatctcaatcttatttgcatattaatagaa

SEQ ID NO: 2007 - DNA, 65 bp, Candida albicans
ttaaactccattataaattattcaacaattatataaattaccattgatttgtccttgtgtttgga

SEQ ID NO: 2008 - DNA, 65 bp, Candida albicans
tcctattggtcccccgaattttatcttttcaacaaagatatatatatattctactactattactg

SEQ ID NO: 2009 - DNA, 65 bp, Candida albicans
tttatctaacccacaatcagttgaaggtataatttctgcctttggtgcccaattcggtaagaaat

SEQ ID NO: 2010 - DNA, 65 bp, Candida albicans
gtaactattgcaactgatgcaatcaagacggtttgtaacattgtatttcgttcatcctcggaatc

SEQ ID NO: 2011 - DNA, 65 bp, Candida albicans
taatcatcacacgatacttaattttcttatttctaatatttaatatctttatatcttatatatat

SEQ ID NO: 2012 - DNA, 65 bp, Candida albicans
gttaatgcaaattttcttgttactgcatataaaccataccaaacttatgttaacacaattctgta

SEQ ID NO: 2013 - DNA, 65 bp, Candida albicans
tttgacgttttgttcctccttatcaccaaactccatcgatttatattaattcggaagttttgaaa

SEQ ID NO: 2014 - DNA, 65 bp, Candida albicans
ccaattgcttacttacttaatttggggcaaaatggaattaggtaaattttgattattactcacca

SEQ ID NO: 2015 - DNA, 65 bp, Candida albicans
caatgcgataaaaatcatcaacaccatataaatttttcataaggcgatttatgggttccacttta

SEQ ID NO: 2016 - DNA, 65 bp, Candida albicans
aatgcccgaatgggattgacagtaatgccacagtaattttaacgtttacacccgaaaccattgaa

SEQ ID NO: 2017 - DNA, 65 bp, Candida albicans
agtgtgaatagatatttgaaagatgtagtagattattttgagcatatgtacacgaacaatgttat

SEQ ID NO: 2018 - DNA, 65 bp, Candida albicans
aattttttattggccgtgccgtaatatattactaaaaattcattattagtagataccctgtaaat

SEQ ID NO: 2019 - DNA, 65 bp, Candida albicans
aacttcgtcactccacactcagataaacgtgggataatctccccaaatatatacagaaaactcgt

SEQ ID NO: 2020 - DNA, 65 bp, Candida albicans
cgtactagctactactcacttttactttctaaactgtaacaggtgaataacatcacatatttctg

SEQ ID NO: 2021 - DNA, 65 bp, Candida albicans
cctctccttctcttcaacaaaaaatactgaacaataaattttaaaaactatataaatacttcaac

SEQ ID NO: 2022 - DNA, 65 bp, Candida albicans
agtatcttacacgaatcgagattatcaaattgccaaatgccaattcggttggatgggataacttt

SEQ ID NO: 2023 - DNA, 65 bp, Candida albicans
cttctaataaacaatttggcatccattacagtatatgaaatgatcgaccagttgctgaatccaaa

SEQ ID NO: 2024 - DNA, 65 bp, Candida albicans
ggaaacaaacagtgactctaattaatacttttcaatattaagataatttgaattacgttttcaaa

SEQ ID NO: 2025 - DNA, 65 bp, Candida albicans
ctttgttgttgtttctagtttttgtttaatttcattttacctaccatctttattcatatcctttt

SEQ ID NO: 2026 - DNA, 65 bp, Candida albicans
attagttactacaactactctgttaacatctaagtttgatacaaacccaccctttgtttagagaa

SEQ ID NO: 2027 - DNA, 65 bp, Candida albicans
gttgtgtttgtgcaatactcattgctccttgcttacaaatcaacaaatttcaaaccactactacc

SEQ ID NO: 2028 - DNA, 65 bp, Candida albicans
gccttaaagcaaattactatatcactgatatccgtagtttatatattatgattggtgattgtgta

SEQ ID NO: 2029 - DNA, 65 bp, Candida albicans
ggaacagaaaaccaaaccccaccccaagtcacgtgaactaagctcatttgggcgcaattacactt

SEQ ID NO: 2030 - DNA, 65 bp, Candida albicans
tgttggtcttaataattgaattgattaattgatagtccaaagccagcaagccagagaattgttga

SEQ ID NO: 2031 - DNA, 65 bp, Candida albicans
attcttcgtatgatgatctgactgtgtgacagctactactgccactgctaccaaatgtggtatat

SEQ ID NO: 2032 - DNA, 65 bp, Candida albicans
agaagagggcaataacgagaagcattgattggttaaagtatagtagtatatattcataatatatg

SEQ ID NO: 2033 - DNA, 65 bp, Candida albicans
ttaatttctagtgagagacaacgcgttctcatatattaatatatactactataaatatgattgtt

SEQ ID NO: 2034 - DNA, 65 bp, Candida albicans
gattaatattttatctggttttgctaattgggtctagctttaagaccgacaagatttcagtgtaa

SEQ ID NO: 2035 - DNA, 65 bp, Candida albicans
attcatcattcgttacttctgagtttatacttgccatttccaatcgatcattcatatcaaatact

SEQ ID NO: 2036 - DNA, 65 bp, Candida albicans
tatgataaggcctataaagattacacagaaagaattaaagcattagcacctcattacattgaaat

SEQ ID NO: 2037 - DNA, 65 bp, Candida albicans
ctcaagaaatattgtatagattgagacatgattgtataactccatattgaattttaacataattc

SEQ ID NO: 2038 - DNA, 65 bp, Candida albicans
cacacaattgaatatgtattgtaagagaatagaaacaaatgtaaaggaggcatttccgtcttaga

SEQ ID NO: 2039 - DNA, 65 bp, Candida albicans
atattagaactgaggatgtttaacaaagttaaatacgacatgtacaacgtttcttatatgcttgt

SEQ ID NO: 2040 - DNA, 65 bp, Candida albicans
ttgagaggtctctaatgacaaataacaagttcatatctattctagaagaatatataacaatttaa

SEQ ID NO: 2041 - DNA, 65 bp, Candida albicans
attatacacatttatccaacattgcttttactatttggacattatttccaattaaatcattatac

SEQ ID NO: 2042 - DNA, 65 bp, Candida albicans
gtacaccagaaggactttataacagtattcaatcaataagaagctcaatactgtgtataactatt

SEQ ID NO: 2043 - DNA, 65 bp, Candida albicans
aaatttaaactgaaaccattgtccactttgtcataagtatgtatataaatattgagacgtctgcc

SEQ ID NO: 2044 - DNA, 65 bp, Candida albicans
gttaccctgcttaatcaatgacatttgctcctcagaattatttgaaattgtattatagaatagta

SEQ ID NO: 2045 - DNA, 65 bp, Candida albicans
cgttcataagatttgatcaattcctcttgtagtttatgtacaggaaactgtaactgagtggaaat

SEQ ID NO: 2046 - DNA, 65 bp, Candida albicans
caaactcaatattgggagctgggatcattggacaaccttatgcattcagaaatagtgggttaatt

SEQ ID NO: 2047 - DNA, 65 bp, Candida albicans
ttgatctatcgtcgttgtcacatgttatatactataatagaacacgatttaaatgaatactcctc

SEQ ID NO: 2048 - DNA, 65 bp, Candida albicans
aaagattatataaataggtattagaattcccatcaactgtccatccaaattctttcttttattcc

SEQ ID NO: 2049 - DNA, 65 bp, Candida albicans
ctggtgctatacaacacttggcaggcatgaaggattcgaaagtgattgttgctatcaacaaggat

SEQ ID NO: 2050 - DNA, 65 bp, Candida albicans
tttaagttcaagctgctagtgctatttccactacttgcagattgaaataaatctgcaaatgcatc

SEQ ID NO: 2051 - DNA, 65 bp, Candida albicans
taatacgtcatataattagtgatacaatagtcattaacttgaaacttcaccttccactacaatcc

SEQ ID NO: 2052 - DNA, 65 bp, Candida albicans
ttaacaaccacaactacagacatacgttcaagtatctgattatctaagaattatacatatagtct

SEQ ID NO: 2053 - DNA, 65 bp, Candida albicans
actaaataggcgatagaataattaataattactacaagtgatataagaaatgatttgattcagtc

SEQ ID NO: 2054 - DNA, 65 bp, Candida albicans
ataaatgtaaaatctatcacaacatgtgtacttaattttctgtggtaggggaggccatttcgttg

SEQ ID NO: 2055 - DNA, 65 bp, Candida albicans
tgtgtttgcacccagataatgaaacaatatgaaatggtcgattctcttcgtcatatttattctcc

SEQ ID NO: 2056 - DNA, 65 bp, Candida albicans
ttctgctatactatcgactacattttccaagctaatcaagcttaccaagctatttttattgttga

SEQ ID NO: 2057 - DNA, 65 bp, Candida albicans
ttagaataagtattcttctgtgaaatattttctggtaagctctacaggtgtctttattccagatg

SEQ ID NO: 2058 - DNA, 65 bp, Candida albicans
aatcttagagaccttcctctcttgattgagtaaggaaattgagggaataggagtggcgaatgaag

SEQ ID NO: 2059 - DNA, 65 bp, Candida albicans
ggagtattgtgatggtatcatatatcaatgagctgaatccacgacaaataacgaaccatatctac

SEQ ID NO: 2060 - DNA, 65 bp, Candida albicans
ccgttcatctttatattggtttcctagttcagacaattcatctctttaacatagattacacttgt

SEQ ID NO: 2061 - DNA, 65 bp, Candida albicans
tcaagactatccccattcatccccagtcgactttagtagtatctccgattttaccattcccggca

SEQ ID NO: 2062 - DNA, 65 bp, Candida albicans
ttagcattggatttatctcaccactccactttctgaaattataaatactacaccatattcacttc

SEQ ID NO: 2063 - DNA, 65 bp, Candida albicans
gttgttgttgttatagtattgttgttgttgttgttatatgtttactccacacttttcttttctct

SEQ ID NO: 2064 - DNA, 65 bp, Candida albicans
atataacttgcatagtttaaaggggcgttcattactagatgggatggtggtttgttatggatttg

SEQ ID NO: 2065 - DNA, 65 bp, Candida albicans
tgaagaccatttacgccgcacaaacgtggaaccaccccccaatttgtgataattattatcctcaa

SEQ ID NO: 2066 - DNA, 65 bp, Candida albicans
aaagttatgctggtcataattttaattataatgtatatgtaggttcttatagttcaatgttattt

SEQ ID NO: 2067 - DNA, 65 bp, Candida albicans
aggtagtgtatacttactcaattttttttttttggtcgcaaatttttttcattttgccttattaa

SEQ ID NO: 2068 - DNA, 65 bp, Candida albicans
ttgttctcacttatctttttcatcagccaaagatgtatgcaattccgatcggaaatcaattttgc

SEQ ID NO: 2069 - DNA, 65 bp, Candida albicans
ttttaaaaaaaaaaaaataaagcgacagaaaaagaaaattttgcatcaataatgcacgacccaat

SEQ ID NO: 2070 - DNA, 65 bp, Candida albicans
gcaaggatttatttatatgaagtttcggttgaaaagacaaaaaaaaactgtggctgcgaatttcc

SEQ ID NO: 2071 - DNA, 65 bp, Candida albicans
acaacacggataaaagcatttctttttcaaactacgaaaataaagaaaggggagggggggaagaa

SEQ ID NO: 2072 - DNA, 65 bp, Candida albicans
ttttttttgcaattctaaatttttttttctgggaaattgtttatcagtgtgaaaaatcttacaat

SEQ ID NO: 2073 - DNA, 65 bp, Candida albicans
ggtaatatccatccgtgatggtgaaagaataaaaccgaagtatcgttcacatataacgcgttgga

SEQ ID NO: 2074 - DNA, 65 bp, Candida albicans
tctaaatcaaaaatttcctgtaatgtttctagatcccctactctagaatcgtatattaccacatc

SEQ ID NO: 2075 - DNA, 65 bp, Candida albicans
tatgtagacaaggtaatacaaagtaaagtattatttaatagtcaattgtttcactgtagtacacg

SEQ ID NO: 2076 - DNA, 65 bp, Candida albicans
gaataatagtagtgctaaacaacttaaattaaagaaaaaaagacaaaacaaaaaaaattaaatct

SEQ ID NO: 2077 - DNA, 65 bp, Candida albicans
aaaaaaaaaatgagcagagaacactataagtgcaaagtgagaaagaaacaagcaaaaagcaaaag

SEQ ID NO: 2078 - DNA, 65 bp, Candida albicans
aatttattaactatattgttacaatcaacattataacctcaactgaaagagagcctattggcttg

SEQ ID NO: 2079 - DNA, 65 bp, Candida albicans
ggacacggacacggacaacatgtaatgcttgcatcgtactagttttgcatttcattaaaattctt

SEQ ID NO: 2080 - DNA, 65 bp, Candida albicans
gatttcacgagttaattgtttcacatccctttgagactttaacatgggagtcaacctagatgggt

SEQ ID NO: 2081 - DNA, 65 bp, Candida albicans
agccaacgaatccggtagtaaatacacgccatagataatactactatccacaaccactatcacca

SEQ ID NO: 2082 - DNA, 65 bp, Candida albicans
catatctattactattcaactcttatcctaattagtccaggtttcccaatatcaatcaattttcc

SEQ ID NO: 2083 - DNA, 65 bp, Candida albicans
ataacaaactagaccaaagtgatcccacattcgaaagtaatctttgatattaccttaccttactt

SEQ ID NO: 2084 - DNA, 65 bp, Candida albicans
gataatataatacaagttagtcaactaataaacgattggttgatatgtttatgcccaatatgtgt

SEQ ID NO: 2085 - DNA, 65 bp, Candida albicans
agctaattctgatgaagaagtaagaatgagatttgaaataaatcgaataatttgtaatgaacttg

SEQ ID NO: 2086 - DNA, 65 bp, Candida albicans
cttctcaccaccaccaacaacaacgttcacccatttcaatagacgaataaactgaagcaatagat

SEQ ID NO: 2087 - DNA, 65 bp, Candida albicans
gatccaagatatctccaaacttgtttatactttaatcgttaggtttttgttttctttcaacacac

SEQ ID NO: 2088 - DNA, 65 bp, Candida albicans
ccaacattatttgttgctgacgtaatctgacttgaaacatgtcccaattaagtttatattatgtg

SEQ ID NO: 2089 - DNA, 65 bp, Candida albicans
agtgggccacctccctcatggccttcatctccttagcatgctgtgccatcccatatttattcttc

SEQ ID NO: 2090 - DNA, 65 bp, Candida albicans
gttttccaatctatggatttaacttacttccaacaattctacaatttcccagcttttcaagagac

SEQ ID NO: 2091 - DNA, 65 bp, Candida albicans
acttggattataaagcaatcttgaaacatttaacgttgcactaagatttaggttaaacattgttg

SEQ ID NO: 2092 - DNA, 65 bp, Candida albicans
aaagagcattttgttattcccttacattatacttattttcaaagacctaccatttccaggtatat

SEQ ID NO: 2093 - DNA, 65 bp, Candida albicans
ccgaataacatttcattcattcaagtactaccactcccataaacaataaatcgtccaatacaaat

SEQ ID NO: 2094 - DNA, 65 bp, Candida albicans
tgtaaacaaacccaatggtttatatgcagaccactattaaagtagtagtgtaactgtgcacaaaa

SEQ ID NO: 2095 - DNA, 65 bp, Candida albicans
tcaataagattcatctttgagtgtttggttgatgagtagatggggttgtcttttagaagtatata

SEQ ID NO: 2096 - DNA, 65 bp, Candida albicans
cacatgtcctcatctgtgttgtatgtatgagacataactagctagtcttgtctaatagataagtt

SEQ ID NO: 2097 - DNA, 65 bp, Candida albicans
ggaactgacgaatctactttcgttttatctttgagtatttgatcagcaaagataaaacagttgcg

SEQ ID NO: 2098 - DNA, 65 bp, Candida albicans
taatttaatcaattgtagttggaattgattaattttgtgccatttctctaattagcttaaacatg

SEQ ID NO: 2099 - DNA, 65 bp, Candida albicans
gcgagggagttaagttctgattgactatagacaacccaccatcagtcatcaatcaactatcacca

SEQ ID NO: 2100 - DNA, 65 bp, Candida albicans
ctacctggtaagttcataataccatgacctcttgtattacaactatgataaataacctagaagtt

SEQ ID NO: 2101 - DNA, 65 bp, Candida albicans
ttagttcaagatggtacacttaattatttgattacttgaaccgttgttcaaaaataatccatgcc

SEQ ID NO: 2102 - DNA, 65 bp, Candida albicans
ttaaacttgacgtgcctgaggaagaagtcgtatcggtcttcaagaaagataatgctatatcacag

SEQ ID NO: 2103 - DNA, 65 bp, Candida albicans
tttcattcattaacaaatttgctcaagtcaagtcaagtctcatagtcaaagttaacatttcattg

SEQ ID NO: 2104 - DNA, 65 bp, Candida albicans
cttcgttccacgttttcccattcggccgaccaatgtggaattaaattttacgtccacacacccac

SEQ ID NO: 2105 - DNA, 65 bp, Candida albicans
accattgataaggatattagaacagtaagaattgtgtgtgcgtgtggatcaaccaaacagaaaag

SEQ ID NO: 2106 - DNA, 65 bp, Candida albicans
attatagaatattcaacaattatcttgttgtccatccctttcagttgtcctcgagaacaactcct

SEQ ID NO: 2107 - DNA, 65 bp, Candida albicans
aagacaccctctggtatgtttagttgaatgtgatttagtagtggtgttgtagttaaatttacttg

SEQ ID NO: 2108 - DNA, 65 bp, Candida albicans
gttgtttattaacaaaattaacatgaacatgaacatccaatgtccatacgacaaaggtgttttgg

SEQ ID NO: 2109 - DNA, 65 bp, Candida albicans
aaatcaactaactagccagctaaacctccgaagaagaattctatggaaactccattgtttgttgc

SEQ ID NO: 2110 - DNA, 65 bp, Candida albicans
cacaagtttctagtcattagattgttgcattatttattctatagatttctagaaacaaacttcgt

SEQ ID NO: 2111 - DNA, 65 bp, Candida albicans
gagagccgattacttcgttgctgcagactgccacagataccattaatcaccagaatgcacaatag

SEQ ID NO: 2112 - DNA, 65 bp, Candida albicans
tcgacaaggcgcagcaccataagtatgttgacaactttaagttgcaattgagtgtagatgatggg

SEQ ID NO: 2113 - DNA, 65 bp, Candida albicans
tattttatcagggaagccacatccaaccaccagttacatcccacaaaatcccttaatcttgttct

SEQ ID NO: 2114 - DNA, 65 bp, Candida albicans
ccaactcttaatactttgaaagtctatttaaagaccccagaaacgacgacgtggggagaaacaat

SEQ ID NO: 2115 - DNA, 65 bp, Candida albicans
agtaaactcaattaacttatctttatctcaattatacggctaagttaaattgcgtggtataaatt

SEQ ID NO: 2116 - DNA, 65 bp, Candida albicans
agttattccgtttctcgtggtactgttatcagttgcagccacacaaatatttgcaatcctcacag

SEQ ID NO: 2117 - DNA, 65 bp, Candida albicans
ggcggaattgatatcacgtagagcaacgaaggttgaatgtgtgtgcactttgaccgagaaatctg

SEQ ID NO: 2118 - DNA, 65 bp, Candida albicans
gttgtttcccaatatctttggtttgctataatatattcttatatataaatacgtttacaataata

SEQ ID NO: 2119 - DNA, 65 bp, Candida albicans
tatgtgatcctatcgtgagaatcgataagaatttggacatatacatggactcaccctataaaggg

SEQ ID NO: 2120 - DNA, 65 bp, Candida albicans
cgtttatacgtagtttactcccaatactctcactgttgattaatatatcagaggcacgttataat

SEQ ID NO: 2121 - DNA, 65 bp, Candida albicans
taggatacgtgcttgcatttaaatttggtatggagatgagtgggttatggattggattgactatt

SEQ ID NO: 2122 - DNA, 65 bp, Candida albicans
cgtcagcatcatagataatatgaatattggaagagttatgtgtatcagttggatgtttcagacgt

SEQ ID NO: 2123 - DNA, 65 bp, Candida albicans
actcctttattttttcaaaatcaatagactgaggtgtctgagccattctgcatcacagtttgtcg

SEQ ID NO: 2124 - DNA, 65 bp, Candida albicans
actaaaacaaaacccaacatttaaacttatggttgaagaagtatcaactcttggaagaaggtggc

SEQ ID NO: 2125 - DNA, 65 bp, Candida albicans
aatgttgctcagcttgtaatgattacatttgcaccctattactgtaaattgtgtgtatctatgct

SEQ ID NO: 2126 - DNA, 65 bp, Candida albicans
atacctgttctcaataaggaaatcgaaacaattgttgtaaataccgaaacttagatattgtacag

SEQ ID NO: 2127 - DNA, 65 bp, Candida albicans
aaaatttctgtcacataatgggatatttctacatcttatatatttatcagcaatgagatttgttt

SEQ ID NO: 2128 - DNA, 65 bp, Candida albicans
taatgcctctccttctttccatccaaatgattgtaaatatatgctggcattcataatgtttagac

SEQ ID NO: 2129 - DNA, 65 bp, Candida albicans
attctggaacttgtgaagacatatttgtgatttcttgattatcttgaatttatctttaggagtat

SEQ ID NO: 2130 - DNA, 65 bp, Candida albicans
atgttatagttaggaaatgtttttcttggaacgaatgtcataatgagataataaataggaattcc

SEQ ID NO: 2131 - DNA, 65 bp, Candida albicans
gagtattactagtgggttgttcaaaattaagttgttgatttaaagttttattatacatttgcagc

SEQ ID NO: 2132 - DNA, 65 bp, Candida albicans
agtaagctgtacacaataagtaactaccttttctagaattgggatgctcgcatggcacctggcag

SEQ ID NO: 2133 - DNA, 65 bp, Candida albicans
actaatgcaagcaactcatatttgcttatactgtagcatatatccaaattgggaagtctacaaaa

SEQ ID NO: 2134 - DNA, 65 bp, Candida albicans
atactgttgttagaagtttattcggtaaatctcttcaatttggtctggtaactagcgggataaac

SEQ ID NO: 2135 - DNA, 65 bp, Candida albicans
ggagcttgaattgacatttagatgatttggtataaacaggttgtcccgtggttagttggttggta

SEQ ID NO: 2136 - DNA, 65 bp, Candida albicans
cacattcttgagtctgctgatattgctggtgtggttaaacaacattgattgtgttttgtggtgtg

SEQ ID NO: 2137 - DNA, 65 bp, Candida albicans
tatgaaacatttaagaatgtaaagagtaatctgctatgtactgtatgtaaatgaatttagtatac

SEQ ID NO: 2138 - DNA, 65 bp, Candida albicans
ataaaacttcattctcgtaagaaattaatttttaaacaaaatgtaaacaaacaaaaacaacagaa

SEQ ID NO: 2139 - DNA, 65 bp, Candida albicans
cttattatatacccatttcttcaatagttggattggattagtattttcacacagatcattcgctt

SEQ ID NO: 2140 - DNA, 65 bp, Candida albicans
agtacaatgtaggattatgtgagtatgaggttactagatgactcaagtcgtataatatttgatta

SEQ ID NO: 2141 - DNA, 65 bp, Candida albicans
aagttatagattcaatgtaaagtcaagcgtcttttacctatatttgcgaaatcctgcttcattgt

SEQ ID NO: 2142 - DNA, 65 bp, Candida albicans
ctctctcggtatttatttcaatacatccaatctattaactgacattcatcccaaaactaatctac

SEQ ID NO: 2143 - DNA, 65 bp, Candida albicans
cctttgcccctgttacccattgatgatatttgactttcctttatttagtataataataaatactt

SEQ ID NO: 2144 - DNA, 65 bp, Candida albicans
ctctttatcattagttggaaataaacacaaaccaagtttactgccatagctgaatctaaaggctc

SEQ ID NO: 2145 - DNA, 65 bp, Candida albicans
agtacttaccaaattgttgttaaatcttcatacgacaattttgaaatatattgggaagaaaattc

SEQ ID NO: 2146 - DNA, 65 bp, Candida albicans
aacactgatttaagagatgaatgatagcaactagtttctttgagtagcgttatactaacagtttt

SEQ ID NO: 2147 - DNA, 65 bp, Candida albicans
caagtgttgatctattacacatttcccacagcctataatacccaccaacccacacccatataaca

SEQ ID NO: 2148 - DNA, 65 bp, Candida albicans
ttgtcatttcatttcagtatatcatctaatcaatcgttgcaccatcaatagacttgagaaattta

SEQ ID NO: 2149 - DNA, 65 bp, Candida albicans
aggtggttttcttggttttgaaaccttattctttccttgttttgccattgtttaatagtacttaa

SEQ ID NO: 2150 - DNA, 65 bp, Candida albicans
caattccaataacaataacaattccttatcaacttgactaagattacaaattaaataaatcacaa

SEQ ID NO: 2151 - DNA, 65 bp, Candida albicans
aatgtattcggtggtatatgtccgtgagaactgcacataaattacttcacctagagagacagagg

SEQ ID NO: 2152 - DNA, 65 bp, Candida albicans
caagattggtaccgcattgaaatgtggcaaaagaacgagaaaagcctccgtttacgcctaactgt

SEQ ID NO: 2153 - DNA, 65 bp, Candida albicans
tcaaaagtgatactagtagaagtagtggttgttgtggtagttgttgaattagtcatattatatag

SEQ ID NO: 2154 - DNA, 65 bp, Candida albicans
acgacattattagaaatgtctgttcctattcaggcccgagataaaatgtcgttctccaccattag

SEQ ID NO: 2155 - DNA, 65 bp, Candida albicans
tcataaccagtcgacatcgttgacagaaacattaaagagggcttttattgcgatggagagaagag

SEQ ID NO: 2156 - DNA, 65 bp, Candida albicans
agttttcgtagacgttggagtcgattctggcaagcgggaatgtgtcgacagtgtgcttgttcatt

SEQ ID NO: 2157 - DNA, 65 bp, Candida albicans
aaatgataagagtagcagaacagtttgatttgattaacgggacattcttatccagtatttaaact

SEQ ID NO: 2158 - DNA, 65 bp, Candida albicans
gacaaagtaacacactttgtatatgagtagtgtaagtatgccaatatatgtgagtccgctccaaa

SEQ ID NO: 2159 - DNA, 65 bp, Candida albicans
gtattgttatatttgagggatctagtttctattgtttcaattggaatcaattttctattaaatag

SEQ ID NO: 2160 - DNA, 65 bp, Candida albicans
caattaaagattaattgatatcttaataccactaactacagaaaagtctttgtttttatattttt

SEQ ID NO: 2161 - DNA, 65 bp, Candida albicans
tctttagacattgtccttataagttttttgataattgatattaagtatttgatttaatagaatga

SEQ ID NO: 2162 - DNA, 65 bp, Candida albicans
gtgagtgagtgagtgcatgtgtgcgatgagaaatgctaactcccacattaaagagaagagaaaat

SEQ ID NO: 2163 - DNA, 65 bp, Candida albicans
tcgaacaccttggttgaacgtatgccttaacatttgtatcaacacaaccttgggcacatcctcat

SEQ ID NO: 2164 - DNA, 65 bp, Candida albicans
atcaagaccatacctacatagtgggtggtttataactaaatattaatattgcttatttttgctag

SEQ ID NO: 2165 - DNA, 65 bp, Candida albicans
aaaacgtagaagaaatacactaacaagtgatgatgatgatagcctcacacatagtttgtattgaa

SEQ ID NO: 2166 - DNA, 65 bp, Candida albicans
taaaaaagatttggtgatgtaaatagtagtgtagattgcctaaaaattgtgtagaaaaaaacatt

SEQ ID NO: 2167 - DNA, 65 bp, Candida albicans
ctaagtagatccatcttttcagtttcttgatcttgttcagttccttctttcttctctattgattt

SEQ ID NO: 2168 - DNA, 65 bp, Candida albicans
tggccttgtttgttctgctttgttttgttttcattccccccttttcaataattaaaactttaacg

SEQ ID NO: 2169 - DNA, 65 bp, Candida albicans
cagtgaacttattggtaatagctacaccaagaatatccagcttatgagcctgagatgcactgacg

SEQ ID NO: 2170 - DNA, 65 bp, Candida albicans
aaattgatcaatttaatgattattacctaccattttgtaaatgtttctagtagggttatcaattg

SEQ ID NO: 2171 - DNA, 65 bp, Candida albicans
gtaggtgtgttccattctttccacactttgctaaagttatgagtcaacgtcaccggtgcgcttac

SEQ ID NO: 2172 - DNA, 65 bp, Candida albicans
ctcctttacaccaggataactattaactgaactggtgaatacaagacttagaattactaggctat

SEQ ID NO: 2173 - DNA, 65 bp, Candida albicans
tcttttcataattattaaccaatcaattgttgaatacttctcttcttattcttatttcaaagggg

SEQ ID NO: 2174 - DNA, 65 bp, Candida albicans
gttccgttttgtgttgatgttgcttataaatgttaaactagctgcaaatcaatttaacaaaacca

SEQ ID NO: 2175 - DNA, 65 bp, Candida albicans
tacatattactaatgatttgaaataccaactgtcatgcacaaatctttatcaagggtcatgcttg

SEQ ID NO: 2176 - DNA, 65 bp, Candida albicans
gtaacagtattgtttgaagttttagtatgtgacaaagaaatagtcatgtcatctcgtagaagaaa

SEQ ID NO: 2177 - DNA, 65 bp, Candida albicans
aagttattcaatttgggggttatcaattacaccaaagaaaaagatggtgtgtaaacttttaggag

SEQ ID NO: 2178 - DNA, 65 bp, Candida albicans
acaggagaagttatacaaagagtatttgaagactgttgaagaagccaaataaagtaaatagagcg

SEQ ID NO: 2179 - DNA, 65 bp, Candida albicans
acctattgacaaccctgaatttatcgccaaaaaggatgaactttcaaaactagggagcaaagaac

SEQ ID NO: 2180 - DNA, 65 bp, Candida albicans
tagatgagcaatagagtagtaaataatgtaactaattcgtaacacaattatgctttgatgtctac

SEQ ID NO: 2181 - DNA, 65 bp, Candida albicans
tatacagaacatcgttttatcgtctcaattaaagattgggcacactttagtactctataaattgt

SEQ ID NO: 2182 - DNA, 65 bp, Candida albicans
gccatcaatttataatctttaattaataatttagaaaaaattccctttctcatcaaactgggggg

SEQ ID NO: 2183 - DNA, 65 bp, Candida albicans
cggtgtccaagttggtagcgattaacagactaataaagtttggtttgtctcttactacacatcac

SEQ ID NO: 2184 - DNA, 65 bp, Candida albicans
ggtagcaaaactaattctaaaatggacgaacggttggaaggatggaggggtggaggatttattta

SEQ ID NO: 2185 - DNA, 65 bp, Candida albicans
aagagtcagtattattagtacattttgaatggatcaaagagtagaattgttatgggtgtttgtgt

SEQ ID NO: 2186 - DNA, 65 bp, Candida albicans
gtttctcttagtcttcgccgcccactcctcgtttaggaattgttcaatttcactcccacactttt

SEQ ID NO: 2187 - DNA, 65 bp, Candida albicans
gtatgcctaattaggaaaattaataacaccaacgtcccgccccggctgcggtgatcgcccttttc

SEQ ID NO: 2188 - DNA, 65 bp, Candida albicans
caagaattaatttttgcagcattggtatattttcatttccagatattccagtttttccacacccc

SEQ ID NO: 2189 - DNA, 65 bp, Candida albicans
cttaagggagtcaatcgtatctgaatttggattcaatatttcttcaatcccttaacgatttcata

SEQ ID NO: 2190 - DNA, 65 bp, Candida albicans
gacatattacgtaatacacattatttgtcagcaattatagtggtgatgggaaggattaaaagcca

SEQ ID NO: 2191 - DNA, 65 bp, Candida albicans
caccaacgcgtcataatcttcaagatgagggtgtttacgagagaaacaaaaaagcttactccacc

SEQ ID NO: 2192 - DNA, 65 bp, Candida albicans
cttcttgacttgtggcggattgatggaagatatgaatagatgagattgatggactgtggtggtgg

SEQ ID NO: 2193 - DNA, 65 bp, Candida albicans
attctcataagcttcacgagcatacacaaaatcagcgacaacaacaacagttacttccgtcgctc

SEQ ID NO: 2194 - DNA, 65 bp, Candida albicans
ggttgtacgtccttggtcatgtggtgctaatgaacgatgacaccaatccatcatgtaattcagat

SEQ ID NO: 2195 - DNA, 65 bp, Candida albicans
aacagccaaatagaatcatttacctaatcgcatttataatatacattattcaatcattgaccctt

SEQ ID NO: 2196 - DNA, 65 bp, Candida albicans
tagaagaatttaattttgaaaatttcagtcatcgcaaaaataatacgttaagtccgcttttcgta

SEQ ID NO: 2197 - DNA, 65 bp, Candida albicans
attttactacgaagttgttttcattttgtattgatttttgttcaggcaacttccaagatcacgtt

SEQ ID NO: 2198 - DNA, 65 bp, Candida albicans
ggtggtatcagtttcattgtatgcatacaatcgccaaaaaaaattagctcaactgcagaacaaag

SEQ ID NO: 2199 - DNA, 65 bp, Candida albicans
aactagcgatggaaatgaaaataaaaagaattcttctttgaatgtaatcaagcgtattacagttg

SEQ ID NO: 2200 - DNA, 65 bp, Candida albicans
tttgaaaagagatttatccgcagatttacaagaaaaaaaaaaaaaaagaaatcttcaatcttctc

SEQ ID NO: 2201 - DNA, 65 bp, Candida albicans
aatggcgccatccaccaccaccccatgtcttgtttctggtcacaaaaactttgaaaattggcgag

SEQ ID NO: 2202 - DNA, 65 bp, Candida albicans
ttccaacattttatctagtccgtcttcttgatttggtaaagttcttcttaccaatcttacctgag

SEQ ID NO: 2203 - DNA, 65 bp, Candida albicans
gatgtttgaaagacgtaattatttacaaatacacatcaattatttcagacaaatggggttatgtg

SEQ ID NO: 2204 - DNA, 65 bp, Candida albicans
agaacatttacaaatagatagacaatcattcttatacagtaaagtgttcaaattactttattact

SEQ ID NO: 2205 - DNA, 65 bp, Candida albicans
ttgacagtatatgggcatgatacattacctagtcgaactaatcaatggtccctcataccagaata

SEQ ID NO: 2206 - DNA, 65 bp, Candida albicans
ctcgctttttcctcattttccactccgcaaaatttcattgagactataaataacacatttttatt

SEQ ID NO: 2207 - DNA, 65 bp, Candida albicans
attatactacttactagatttcataaagtcaatatctgattgatacaacttggttcattattcat

SEQ ID NO: 2208 - DNA, 65 bp, Candida albicans
ccatttgaagttgtaattgctttgaaaattcggagtttgtgtttgtctacgcgtcacgagatcta

SEQ ID NO: 2209 - DNA, 65 bp, Candida albicans
gtgactttcccgtcaacaatttcccatcccttgattgaggagaatgaatttcctatcccttgatt

SEQ ID NO: 2210 - DNA, 65 bp, Candida albicans
cttccccttcttctatgaatattttcaccacgtatttctttgaataaattcctccccaatcacac

SEQ ID NO: 2211 - DNA, 65 bp, Candida albicans
gtttacattctgaagaagaagatgattaattgttaattgcaaatcatttcatttgttcttttgat

SEQ ID NO: 2212 - DNA, 65 bp, Candida albicans
gccacttccttgtctattattttactcagctattcactctttatcataagaagattataagttgt

SEQ ID NO: 2213 - DNA, 65 bp, Candida albicans
gtatcatagacaactggatgagactagatttgcatattacggataatcaactcaaactcatctcc

SEQ ID NO: 2214 - DNA, 65 bp, Candida albicans
ttgatttcctaattaggcaactcatttattaccacgaatatacttgattaggttaaaagattggc

SEQ ID NO: 2215 - DNA, 65 bp, Candida albicans
gagtctttcgaatcattaattacatctttgatagtaaagtgaagttgttataaacagaatagcgg

SEQ ID NO: 2216 - DNA, 65 bp, Candida albicans
gaaactaatcacccaatttgcggatacactatttgtcatataaactgaggaagagttagtaagag

SEQ ID NO: 2217 - DNA, 65 bp, Candida albicans
gtcacttatttcttcttaactattcaacaataacaacaacaacagttcttgattcaaatttattc

SEQ ID NO: 2218 - DNA, 65 bp, Candida albicans
tttcttccaataagctaattgttttattaataatgatggagatccttctctctttctctttcttc

SEQ ID NO: 2219 - DNA, 65 bp, Candida albicans
catattagccactaatcttattctaaaagaaacttaatcttggtacagaactaaagttagaattt

SEQ ID NO: 2220 - DNA, 65 bp, Candida albicans
gaattacatggagtattattgtggttggggaggcattgctgtcattgctgaaacctagtcgtgtc

SEQ ID NO: 2221 - DNA, 65 bp, Candida albicans
gggtgggtggattattgaagtgtataagttttctattcctgtaaatatggctctgtcttgttatc

SEQ ID NO: 2222 - DNA, 65 bp, Candida albicans
cccgcccatactttatctttaataaagtgttgatattttgtcgttgttgttgtcgttgttgctga

SEQ ID NO: 2223 - DNA, 65 bp, Candida albicans
gtttttataacattattagagagttaaaaccgtattagaatacataaattattaagagcttttca

SEQ ID NO: 2224 - DNA, 65 bp, Candida albicans
tctctcactcactcactcacactcacccattctctctctctttctctctcttaatgttaacaaac

SEQ ID NO: 2225 - DNA, 65 bp, Candida albicans
agaaagggaacaatacaaaaaaaggaaaaaagaaaattttaaataatcacagcaaacagagacaa

SEQ ID NO: 2226 - DNA, 65 bp, Candida albicans
tatagaagtattagatatgtctgccataaaagaataaaactaaactagacaagtgtatagaatct

SEQ ID NO: 2227 - DNA, 65 bp, Candida albicans
tgggcaaaatgggggatggaaggaaaaatttaaaatcacaaactttatatatcctccaacggatg

SEQ ID NO: 2228 - DNA, 65 bp, Candida albicans
acaaaagtcgaaaaaaattctgttgattgttgatgaaacttccaatctataattcttaaataaag

SEQ ID NO: 2229 - DNA, 65 bp, Candida albicans
tttagtcaagcttgctgataccacatctcacgaaaaaatcgacagttacataaaagagaattcca

SEQ ID NO: 2230 - DNA, 65 bp, Candida albicans
cacacatacaaaacaaacttcctttcatccataaaatcacaagccaaaattaaacatagagagac

SEQ ID NO: 2231 - DNA, 65 bp, Candida albicans
tacccaagtacatgcacgtgtatgctgtatacttcaattaacattaattttgatttgcttttttt

SEQ ID NO: 2232 - DNA, 65 bp, Candida albicans
aaagtattatgagtcaacgggcaaatttttttttttgcaaatatatcactaatattttttttttc

SEQ ID NO: 2233 - DNA, 65 bp, Candida albicans
attttattctttttatttgtaattaatttcaagttataatcttactagttattcataactcccca

SEQ ID NO: 2234 - DNA, 65 bp, Candida albicans
atgatagatattgagataggttaaagactttagtaacgatatttacttttaaatgtcgtgaaact

SEQ ID NO: 2235 - DNA, 65 bp, Candida albicans
tcttttctctttcccctgctaaaactataatttacgactattgcttatagatcttagacagagaa

SEQ ID NO: 2236 - DNA, 65 bp, Candida albicans
attgtcaaatccaaaaacagtaattttccattttgcaaacttgatgaatgaaaaaaaaaaacgag

SEQ ID NO: 2237 - DNA, 65 bp, Candida albicans
ttcatctaacgctcaattagaagaaatgccggactcgagacaaagacttgaatggagttctggcc

SEQ ID NO: 2238 - DNA, 65 bp, Candida albicans
tatctaatagtaactataaaacatttttttccttctctgtttggtttatgttttctgcgtttagg

SEQ ID NO: 2239 - DNA, 65 bp, Candida albicans
tattaaacaaagctttttttctttctttctttcatcaccaacatcatcatcatctccgtctttgt

SEQ ID NO: 2240 - DNA, 65 bp, Candida albicans
gttgtgtatttatagtattgttggtctttcgaatatttgggcaacggttcgacccgaatgtttag

SEQ ID NO: 2241 - DNA, 65 bp, Candida albicans
agactggtcagttttagtttgtaaactggtactaactataatatgttactcttgtttagtcactt

SEQ ID NO: 2242 - DNA, 65 bp, Candida albicans
aaattttttttctgctttatatttggaaactagaaagagtgatttatattttataatcattttat

SEQ ID NO: 2243 - DNA, 65 bp, Candida albicans
attcgactattttgccttcatttaaccttgtttactttattttaataagtttgactcttttcata

SEQ ID NO: 2244 - DNA, 65 bp, Candida albicans
tcttcctatttccttctttcttttcttcttttttacttttccttgaatttcctatatttacaaat

SEQ ID NO: 2245 - DNA, 65 bp, Candida albicans
gtatcattgatcaattgaaacgaatatatcacgtgactagcacatgatcggtattaaagtttcta

SEQ ID NO: 2246 - DNA, 65 bp, Candida albicans
aataaatagataataaatcaattgtattacagtgaatatacataacacggcttttcatagagtat

SEQ ID NO: 2247 - DNA, 65 bp, Candida albicans
ttaacttgtccggaatggatatcaatgcagcccctaaatttggtcatctttggctgaattaggct

SEQ ID NO: 2248 - DNA, 65 bp, Candida albicans
gtagtaataatagtagtagttccaagtagatggaagttgatcaggaacgcgttcaaaatcaaaat

SEQ ID NO: 2249 - DNA, 65 bp, Candida albicans
aggataatttccagtatctattgctcttcttaatattgatctgagtatctcgaaaggtgttttca

SEQ ID NO: 2250 - DNA, 65 bp, Candida albicans
cagcaaccccaaaacttatttattattcacatatgacataaatcttactaagctttgcaatgaag

SEQ ID NO: 2251 - DNA, 65 bp, Candida albicans
ttttacaaatttttcttgtttttcttgtttttctttttaatcatcaatcaattgaatctaatcaa

SEQ ID NO: 2252 - DNA, 65 bp, Candida albicans
atagttatacatgtcatatttattgaaaccaccatggttgattcatatattaatgaacttctaca

SEQ ID NO: 2253 - DNA, 65 bp, Candida albicans
gaaaatggcaaaaggaaaggaaatgcttagtaatgtggtcgtgtatatgcgcaacaatggttttt

SEQ ID NO: 2254 - DNA, 65 bp, Candida albicans
atcgcagaaccaagcaaatttacacgacccaagcttctttactaggaaggtttttgtcagacaaa

SEQ ID NO: 2255 - DNA, 65 bp, Candida albicans
tatataatacgcatttgtacaacattaaaattattatatttatatatataaaagtatatgaagag

SEQ ID NO: 2256 - DNA, 65 bp, Candida albicans
cattgattattcatttaatagtttacacaaatctttcttattctctttgccttgtcttgtctttt

SEQ ID NO: 2257 - DNA, 65 bp, Candida albicans
aaagtagttttttagagtagagtagagtagaattaaaaaactagaccaatgcgcatagagtatac

SEQ ID NO: 2258 - DNA, 65 bp, Candida albicans
atgcctataatgaaaaatgtctatagtatcaagtgttttgtagtactctcttgtctaaggtattc

SEQ ID NO: 2259 - DNA, 65 bp, Candida albicans
taacaaaagaaacagaaagcaagaaagaaagaaagaatctatagttgcatcagtccatttaacaa

SEQ ID NO: 2260 - DNA, 65 bp, Candida albicans
acccaatcacattggccaccaagaatttagacatcagtaaagttggtgattcaaacctgttccac

SEQ ID NO: 2261 - DNA, 65 bp, Candida albicans
tccatccatgcccataaatagtattttcttatttatatacagaatgatatccttgcaatcaagtt

SEQ ID NO: 2262 - DNA, 65 bp, Candida albicans
ttaatttttcccccttctctctccttttttgttgtttatattagtttggtcagattgaaattttt

SEQ ID NO: 2263 - DNA, 65 bp, Candida albicans
ctaactttttaaacccctagtaggagcttcacctgattcacaatttttacaaagacgtcgtcgag

SEQ ID NO: 2264 - DNA, 65 bp, Candida albicans
agtacttccacattaaagcaaaacgctattacaaatagaatttctcgtgtgcctagtccgcaatc

SEQ ID NO: 2265 - DNA, 65 bp, Candida albicans
ttatgcacacacacattaaacaatagaaaaatttaattccacagcaaaaaaaaaaaatgagacag

SEQ ID NO: 2266 - DNA, 65 bp, Candida albicans
atatgtaaaactaaatagaaatattctttaggtgacatatttattaacaataaatagtcgtgtaa

SEQ ID NO: 2267 - DNA, 65 bp, Candida albicans
ataatagaattattttattattttaaggtgtactcacactttagtttttttttcctttcccttcc

SEQ ID NO: 2268 - DNA, 65 bp, Candida albicans
ttgttcaaggttcggttgactttttttttttgtcgttgtttctcatttggttggttggtctgggt

SEQ ID NO: 2269 - DNA, 65 bp, Candida albicans
ttatgcaaatacagtacgtgttgaatcagttgttatttattttagcttgggttaattctaccaac

SEQ ID NO: 2270 - DNA, 65 bp, Candida albicans
aaacactccaaaccttatcattgtgtgccttgatagagtgtagtaattgaaccatatagaacgta

SEQ ID NO: 2271 - DNA, 65 bp, Candida albicans
tttttaaaaaggttcctatatgagtattgaatatcttgataagagggtatcgttgtatctaatat

SEQ ID NO: 2272 - DNA, 65 bp, Candida albicans
gtataaaaaaagtgctatttaaatttgcttgtagttgaacagtgaccgttaacttaagagtcata

SEQ ID NO: 2273 - DNA, 65 bp, Candida albicans
actagaactttgcgattcagatacaagtggtgcaaccatgtatattggactaaagaatgatagta

SEQ ID NO: 2274 - DNA, 65 bp, Candida albicans
acccgcctactcaaatttttgcttcgtcatacaattacttcaatactaaaaaaatttacaaaaac

SEQ ID NO: 2275 - DNA, 65 bp, Candida albicans
aagtaggcgagtctacgagtattctcatggaaggtatacgtattaattatatagattcagacaca

SEQ ID NO: 2276 - DNA, 65 bp, Candida albicans
ttgaaaactgaaaaagaaaatccacataacccaaaaaagctaactagaaaacgttgttcaatttg

SEQ ID NO: 2277 - DNA, 65 bp, Candida albicans
tgcttttgtaacccaatcttatttccgatttccactttgctgaaatatactttcgcaaacagtct

SEQ ID NO: 2278 - DNA, 65 bp, Candida albicans
tttataattcttatagaattaatattcaacttgttctgtgtgtgtgtgtgtgttgactttctttc

SEQ ID NO: 2279 - DNA, 65 bp, Candida albicans
taaatgctttctatctagtggtataagtaaacaataaagcagtccatgtcagttgcacaatacat

SEQ ID NO: 2280 - DNA, 65 bp, Candida albicans
cgatcagtaccccaaaaaaaataagctttcatgttagcgccgattacacatgtaatatttatgga

SEQ ID NO: 2281 - DNA, 65 bp, Candida albicans
agagagaaagagaatgagttgtgttgtgttgttgttcaaaatttttgaattgtcaattgatttaa

SEQ ID NO: 2282 - DNA, 65 bp, Candida albicans
ttcactctgttttttgcttattacaaattatcacctatcgtgtactaggactaattctcacgaat

SEQ ID NO: 2283 - DNA, 65 bp, Candida albicans
atcaacttcaacttatttttcaataatactgttaccttctttcatcatccttcgttaatagattc

SEQ ID NO: 2284 - DNA, 65 bp, Candida albicans
tggacaagtgccaccacctggtatacactgccatctagtatactacccactacactaccatcgtg

SEQ ID NO: 2285 - DNA, 65 bp, Candida albicans
tatatgcgggaaattatatgcgccaaaatttacatctccgatctaaaccgaagaaaataaaatat

SEQ ID NO: 2286 - DNA, 65 bp, Candida albicans
gcaaaagaataaactctcaagttctttttttttgcgcaggggataaataaccaattctaggcctg

SEQ ID NO: 2287 - DNA, 65 bp, Candida albicans
tccacatgtcagattccacgcgttcaaagaatacaggaaaaaataataatagcgactgaataaaa

SEQ ID NO: 2288 - DNA, 65 bp, Candida albicans
gttattgttattgatggtgactatgccaccaaggcttatggtcaaagagaaaaaaagtaagtaat

SEQ ID NO: 2289 - DNA, 65 bp, Candida albicans
acgttgtaagttacaccaagaagttagcgttcaatagattgttctagagtgagatgatgctctaa

SEQ ID NO: 2290 - DNA, 65 bp, Candida albicans
tggttgtcactccgaaacataatcatcatcaacggtttgttggtttcgtttcttttttttcctgt

SEQ ID NO: 2291 - DNA, 65 bp, Candida albicans
aaagaaaatttacaattaaccattgaaatatatatactacaagttttacaaattatagttattgt

SEQ ID NO: 2292 - DNA, 65 bp, Candida albicans
attacaacaatttcgactccatttaacagtaagaccagcacctttcacattatcattttggtctt

SEQ ID NO: 2293 - DNA, 65 bp, Candida albicans
tgtacgcaaactgtgatagatctaagatacaaggaaaaggggtttaaatctagttatatatcttt

SEQ ID NO: 2294 - DNA, 65 bp, Candida albicans
tgagatgagtgccataatctattcgagcctagtctagagctatcaaagggtttatctcctattat

SEQ ID NO: 2295 - DNA, 65 bp, Candida albicans
tggtatcaaatttttagcatggaatttcaattgtcctaaatttttattcaacttgcaacaatatt

SEQ ID NO: 2296 - DNA, 65 bp, Candida albicans
gttaataaatagaccaagtataggaatattaaaaaccatcaatagactttgaatacgcagaacca

SEQ ID NO: 2297 - DNA, 65 bp, Candida albicans
aaagtaaaaaaaaaaaaaatttttggaattgtcacgactgtatttttatttttctggtttctcct

SEQ ID NO: 2298 - DNA, 65 bp, Candida albicans
ttttttctgttgttgtggccaatttttttttaggtggaaaaataagcagatgagaaattgttaaa

SEQ ID NO: 2299 - DNA, 65 bp, Candida albicans
gtatagtgtagtgtattgtattatatacagtaataggaactagtgagagtgtagtagtagacatt

SEQ ID NO: 2300 - DNA, 65 bp, Candida albicans
actaaatagtcttattattattaggtgatgtaataatagagaaatagcaatcaagattaagatac

SEQ ID NO: 2301 - DNA, 65 bp, Candida albicans
aaattatgatatactaatcaagcaactttaatgactgtcagaacacattatatctttgcctcaat

SEQ ID NO: 2302 - DNA, 65 bp, Candida albicans
gttctcttattgatgttttgcagagttgtctgttttgttttgattttgattgtaatcttttaaag

SEQ ID NO: 2303 - DNA, 65 bp, Candida albicans
atgattaatgaaagatatgaaaatggtttcttgtagttacttaccaataaattttgatgctcatt

SEQ ID NO: 2304 - DNA, 65 bp, Candida albicans
taacaattatttctattactatttttatcgtcgtcctgggtttgctaatattttttcccctacca

SEQ ID NO: 2305 - DNA, 65 bp, Candida albicans
attatgaagggtttttttattgttggtgtttgtttgatcaagttttttttgtttttgagcaacgt

SEQ ID NO: 2306 - DNA, 65 bp, Candida albicans
attattgataatttattaaattaaaaaggaaaagattgttccaaacaaggtcatagcaataataa

SEQ ID NO: 2307 - DNA, 65 bp, Candida albicans
aatttgcttgtggatgctttcctcgtttgaaacaactctcaaatttcaaatgtattaatatggtt

SEQ ID NO: 2308 - DNA, 65 bp, Candida albicans
tattggtgtattgctatgggtgttactttttgatgatgattgggttttttttttaaagatatttt

SEQ ID NO: 2309 - DNA, 65 bp, Candida albicans
gttaggaaatgctgggataaacaaaaaattcaaattcttgtttgaacatagctataagggccact

SEQ ID NO: 2310 - DNA, 65 bp, Candida albicans
ctaatcataccaagttgattattgtatggtggtgtatttgattaaccaatatgcttctatcataa

SEQ ID NO: 2311-3000 - skipped (690 entries)

SEQ ID NO: 3001 - DNA, 65 bp, Candida albicans
ctaactggacgtttcatagtatgggtgagagtatgttgaaatctgattagtccttttctaaacat

SEQ ID NO: 3002 - DNA, 65 bp, Candida albicans
aacaattcttcaattgattttgaaggtgctgaattggatttattccctgtgttatctcccgacat

SEQ ID NO: 3003 - DNA, 65 bp, Candida albicans
tgatcggttggagcggtgatttgtggataagaagccaatatttcttcagtagtcatcgtagtcat

SEQ ID NO: 3004 - DNA, 65 bp, Candida albicans
gtaccagcagcaatggcattcaatttagtgatatcaacagtttcaagttgttcaactgtagtcat

SEQ ID NO: 3005 - DNA, 65 bp, Candida albicans
cggctgttgttgtaagcatgaggacgaagatggctgttgctgttgttgggattgttatagctcat

SEQ ID NO: 3006 - DNA, 65 bp, Candida albicans
cttgctttgatcagggattgcatcatcctaacttgatggaaagcatcaggtgaattaggaaacat

SEQ ID NO: 3007 - DNA, 65 bp, Candida albicans
ggagtgcgtattccgtggctgctagcacttacagtagatggttttggatgttttatcgatgtcat

SEQ ID NO: 3008 - DNA, 65 bp, Candida albicans
cttgatcttattcttctcgtgagtaatgatgacgtagatactcggaattgtttaaacgaaagcat

SEQ ID NO: 3009 - DNA, 65 bp, Candida albicans
aaataaattatagctagttgaatgagtttaataataatgaataaacgtagtagtttccacaacat

SEQ ID NO: 3010 - DNA, 65 bp, Candida albicans
gaagatctgaaataggaagaagttgaaaagagacgtgacagcccaacaaaagctcgtctatacat

SEQ ID NO: 3011 - DNA, 65 bp, Candida albicans
taattaatataattatcttgccattctggaacagcattaaatttcaatgaatgagaaaacttcat

SEQ ID NO: 3012 - DNA, 65 bp, Candida albicans
tcaaaggataattcttctggttggctagatctagtagatctataaacttgtgatgaggaaggcat

SEQ ID NO: 3013 - DNA, 65 bp, Candida albicans
ttccaagtattcttgttagaggaagcaaaaccttgaaatttagctggaactgaatcggtagtcat

SEQ ID NO: 3014 - DNA, 65 bp, Candida albicans
aatttattcacattagataagaaatcagatggatttggaccatatggattagaagcaacagacat

SEQ ID NO: 3015 - DNA, 65 bp, Candida albicans
gttgcaatggtgggaccaataacccctgcaccaataataatagcatcatacttaactgaactcat

SEQ ID NO: 3016 - DNA, 65 bp, Candida albicans
aggatgaggtgttttttaggtgatgaagaatcacgtttttgtcttttattaggactaattgtcat

SEQ ID NO: 3017 - DNA, 65 bp, Candida albicans
ataggggtttcttctttgttttcccattgtttacctccataaaagtatcctcctaatcccaacat

SEQ ID NO: 3018 - DNA, 65 bp, Candida albicans
gccaacgttaacccggaaaaattgagtttattgtcaatgtcggttttttcacttttgatacccat

SEQ ID NO: 3019 - DNA, 65 bp, Candida albicans
tctaacggggtggtgtgtgggtttgaatttgaaaagatgtccataaatttattcagcctctccat

SEQ ID NO: 3020 - DNA, 65 bp, Candida albicans
ggtttggtagggaaaataagaccagcgtaaatgggagtaattaataagaataataaaaacaacat

SEQ ID NO: 3021 - DNA, 65 bp, Candida albicans
aatgaagtgaacaaataaagtttggagatttctgaaggaaacaaatcaactatgaattctgacat

SEQ ID NO: 3022 - DNA, 65 bp, Candida albicans
gattcttttgcgacagcttcataaacaggcaaataaggataagtgtcttctataacttgagtcat

SEQ ID NO: 3023 - DNA, 65 bp, Candida albicans
ttataaatcccattaaataaagactgtaatttagtcagtaacttctttttctctctttcagacat

SEQ ID NO: 3024 - DNA, 65 bp, Candida albicans
gaagatctataaaataaataacgatttagacttgttgaagtcactgatgaaaaatgataattcat

SEQ ID NO: 3025 - DNA, 65 bp, Candida albicans
attgtaaataaagttattataccaataacaatacttataatcaacgttcttagtgaataaaacat

SEQ ID NO: 3026 - DNA, 65 bp, Candida albicans
tcaccgtttttgtaagcttctaaagcttcttcaataggagtaaagatgttagtcatactgatcat

SEQ ID NO: 3027 - DNA, 65 bp, Candida albicans
ggagtaacatcaattaatttagtatctgatgggacaacaaatgaattagttgattcaatagtcat

SEQ ID NO: 3028 - DNA, 65 bp, Candida albicans
agcttgtcgatgattatgtaatatacgtaccgatctgagtccctaaatgcgaaccaaaatctcat

SEQ ID NO: 3029 - DNA, 65 bp, Candida albicans
tttctcagtggtgaacggccaataggtagtcttgataaaagtttcttagttgaagcagataacat

SEQ ID NO: 3030 - DNA, 65 bp, Candida albicans
tcttcaatatcttcctcttcatcgtcttgaacattaaaaagatcgtcttgttcgattgatgccat

SEQ ID NO: 3031 - DNA, 65 bp, Candida albicans
aaaccatttgtaccagtctgaataataatttgccaaccgattgatagtatatctagtagtaacat

SEQ ID NO: 3032 - DNA, 65 bp, Candida albicans
atccttaccaatgcttgacggatgttggcaagatcaagcacagtttctggtttcataaaatccat

SEQ ID NO: 3033 - DNA, 65 bp, Candida albicans
tctgggaactccgacaatatgtatctgagaaataaaatcaaaaatgtaagtatctgtttatacat

SEQ ID NO: 3034 - DNA, 65 bp, Candida albicans
cctagttctcttgcctcaactatttttgttgtcgttgctgttgtttcaattaaatcctgtgacat

SEQ ID NO: 3035 - DNA, 65 bp, Candida albicans
gtgacggataacacaccgattgctttgaatctgtttcgagggatggataaaaagtttatagacat

SEQ ID NO: 3036 - DNA, 65 bp, Candida albicans
gatttttccaaatgatcaaataatgtataagttaaatttttggcatatttaaacccttcattcat

SEQ ID NO: 3037 - DNA, 65 bp, Candida albicans
gcctgagctctagcagaggctaaaacaagaatttgaaacaatgccaacaagtagttgaaaatcat

SEQ ID NO: 3038 - DNA, 65 bp, Candida albicans
gtaactgtggagccaaaagctcgtaaagctttggcgttcatggagaaaaatcttttaacagacat

SEQ ID NO: 3039 - DNA, 65 bp, Candida albicans
gtagaataaccaggtctcaagaccacaccgctttgagaaaacgaacggataaagtgtttattcat

SEQ ID NO: 3040 - DNA, 65 bp, Candida albicans
actactatgatctcatgatgactggatgtgaatattgtaggtcgtggatctaatgagacagccat

SEQ ID NO: 3041 - DNA, 65 bp, Candida albicans
ttttcatcggttagaacttgaacaacatctggttgtttttcattttcaaagtctgaagataccat

SEQ ID NO: 3042 - DNA, 65 bp, Candida albicans
caacttctcgatatttgaggtattgttgttttggaatatgttctttgtatcagaagtcttaacat

SEQ ID NO: 3043 - DNA, 65 bp, Candida albicans
ccatagtcaatattggtgaaatttcgggtgtggcgtttgtaaaatccagatactctgtacaacat

SEQ ID NO: 3044 - DNA, 65 bp, Candida albicans
tttttttttggtttttttttttcaaaatctgtaattattttgactctgatgtatttctgcctcat

SEQ ID NO: 3045 - DNA, 65 bp, Candida albicans
aattcacgaggttgctttaaagcagtagttttagatcttgaatttaatggtaaagattttgccat

SEQ ID NO: 3046 - DNA, 65 bp, Candida albicans
atgcaagtggtgaacaaaacaataatggtatttctacgcaaccaacccaacccaaatggacccat

SEQ ID NO: 3047 - DNA, 65 bp, Candida albicans
ctagcaacacccccaattctcaaactatctttatctcgataccataatgaaggatgagctgccat

SEQ ID NO: 3048 - DNA, 65 bp, Candida albicans
gcgatttcagcagtggttaaaccagcaaaaatggcagcagtagtggcaacttgagaaaacttcat

SEQ ID NO: 3049 - DNA, 65 bp, Candida albicans
tgatcaacagggacaaacgatgacgaagatgatgtatgtgataactcaccttcagataactccat

SEQ ID NO: 3050 - DNA, 65 bp, Candida albicans
aaaaaattgtaaaacgacagtaaagtggccgttaaagcttcatattcatcggcattttggctcat

SEQ ID NO: 3051 - DNA, 65 bp, Candida albicans
gatgatgatttcttcgtcagatgtttatctgaagatatctgcaacactctcgcaagtaaagacat

SEQ ID NO: 3052 - DNA, 65 bp, Candida albicans
atttctaatgatgtggcactggtttcaatgtttaaaagatcgtaatacgtagtatcgactaccat

SEQ ID NO: 3053 - DNA, 65 bp, Candida albicans
tgattataatcacgttgattattatcgtcaaataatttggctcctctattgaaaacctctgtcat

SEQ ID NO: 3054 - DNA, 65 bp, Candida albicans
tataatctgccctttttaggaacagcaaataacaaacggtctggtaaatgattgactaaatccat

SEQ ID NO: 3055 - DNA, 65 bp, Candida albicans
ttaccaacgtgagctttttgaaattgagaagcgtcgtatttagtagtatctgcaactggtgccat

SEQ ID NO: 3056 - DNA, 65 bp, Candida albicans
ggtgatatttcaaagttatcatatagctgtgacccatcatcctggggatgaggattgttagacat

SEQ ID NO: 3057 - DNA, 65 bp, Candida albicans
caattggaatgcgcaacagaataattactcttgttgacttctcctggaataaatgttatagtcat

SEQ ID NO: 3058 - DNA, 65 bp, Candida albicans
gaggtagaaaataaccgacaaatagatgtggttgtggtggttgccgtcttcgtcgccgtaaacat

SEQ ID NO: 3059 - DNA, 65 bp, Candida albicans
gctgcttcaacaatcatacgacctaattggccacctcctaaaataccaacagttttgctatccat

SEQ ID NO: 3060 - DNA, 65 bp, Candida albicans
ttggccaaagcatatccaatacccgacgaagcaccagtaatcaatgcatatttctgctgagacat

SEQ ID NO: 3061 - DNA, 65 bp, Candida albicans
tatataaatacaaggggtttgaggatcgtcaatatcaccgacgatatagatgttgttgttatcat

SEQ ID NO: 3062 - DNA, 65 bp, Candida albicans
ctaccataattgaatttggttgaagatttggtaatcttactaatatgtggagcaaatgtagccat

SEQ ID NO: 3063 - DNA, 65 bp, Candida albicans
tgagcaatgaatccagaagcaccagatacaaatactgtagtaggaaaattagttttatcagtcat

SEQ ID NO: 3064 - DNA, 65 bp, Candida albicans
caaagagcacttaatttgatttttttgacagaactgttaatgattgtatttgtagattctggcat

SEQ ID NO: 3065 - DNA, 65 bp, Candida albicans
gctaatgcatctcttgtgttatgaatatacccattatatgtagggactatacttgaattagacat

SEQ ID NO: 3066 - DNA, 65 bp, Candida albicans
caaaatccctttgtcgaggtactttggcttctttggaattgacgagatatcgttcttctcaacat

SEQ ID NO: 3067 - DNA, 65 bp, Candida albicans
ttagttgttgttacaccagttggtcgttgctttattgtaggactgttattctttatttttgacat

SEQ ID NO: 3068 - DNA, 65 bp, Candida albicans
ggaatcaaaaaaggtactaagacaattgatatggcaacagatatacatattgctggataatacat

SEQ ID NO: 3069 - DNA, 65 bp, Candida albicans
gatttaaaccttaccaatggtcgtatcacgtaattatacttattcggtattagtaatttgaacat

SEQ ID NO: 3070 - DNA, 65 bp, Candida albicans
ggagatgttgataagggagcttctttaaatggtcttaaattatatttgtctttagctaccggcat

SEQ ID NO: 3071 - DNA, 65 bp, Candida albicans
tttgttaatttagtttttggtgttattgattgatttgaagatgaaattgatgattgtattgtcat

SEQ ID NO: 3072 - DNA, 65 bp, Candida albicans
tgttcatttaaatcgactttgaacacatctccacctgtgcctgttccagtgaaatttccagacat

SEQ ID NO: 3073 - DNA, 65 bp, Candida albicans
atataccatagtagaaaaaaataccccgtggtaatcctaaataaggataattcttcttgaaccat

SEQ ID NO: 3074 - DNA, 65 bp, Candida albicans
ttcttgggtggttttgccactttgggctcttcgtccggaagctcttcaatctttggaggtgtcat

SEQ ID NO: 3075 - DNA, 65 bp, Candida albicans
ttttccttctttaactctctagagtcgacatgttgttgttgtagatgttcttcagtatcagacat

SEQ ID NO: 3076 - DNA, 65 bp, Candida albicans
tgtcttttggtacatattgatgatttagccaacctaggtattatacaatggtgggttgaaagcat

SEQ ID NO: 3077 - DNA, 65 bp, Candida albicans
tcattattataataggcagttggcactagatcacgttgaacaataggtttgaatacattaatcat

SEQ ID NO: 3078 - DNA, 65 bp, Candida albicans
tcggggccacggattttgataatactcttagatagctcggccaagccaacattgggaaatctcat

SEQ ID NO: 3079 - DNA, 65 bp, Candida albicans
aaggctaaatcataaacatgatgatataatgaataaatgataattgctacttttccttgtgccat

SEQ ID NO: 3080 - DNA, 65 bp, Candida albicans
tggtggttgattctgaattttgatgggttcttgtgagattctcttgttaaagtgatagttgacat

SEQ ID NO: 3081 - DNA, 65 bp, Candida albicans
ttgttagtattttcgccatcatctctatcccattgaatagaagtaaattgatcttcagaactcat

SEQ ID NO: 3082 - DNA, 65 bp, Candida albicans
ttaattggagcagaagcaaccaaattagctaataaagcagataatacaactgatgaaaatttcat

SEQ ID NO: 3083 - DNA, 65 bp, Candida albicans
gatcctgctattgcaatgggagacggtgcctgttttggtataatattaggaccttttgcgggcat

SEQ ID NO: 3084 - DNA, 65 bp, Candida albicans
gcaacgtcaacgtgatgccatactcttgtgagcgcagatgctgtaataccaattctttgagacat

SEQ ID NO: 3085 - DNA, 65 bp, Candida albicans
agagaaagtaatccattatgttgaaaatttttttttgtctgtcttgccctttttttttgtttcat

SEQ ID NO: 3086 - DNA, 65 bp, Candida albicans
cattcaataaattcatcacgacgatgactctttaatgcatattctactctatatctagatgtcat

SEQ ID NO: 3087 - DNA, 65 bp, Candida albicans
gaggcactggccaaagctgatgatgctacaactgcagcagctaataatgatttaaaagacaacat

SEQ ID NO: 3088 - DNA, 65 bp, Candida albicans
tttctctttttgcaataatcacaagctctggagactttggttcgtttatctaaatcaacatccat

SEQ ID NO: 3089 - DNA, 65 bp, Candida albicans
atggtgtagtcgacgactttttcggagttgacactgatattgtctaaagtagtgttatctgacat

SEQ ID NO: 3090 - DNA, 65 bp, Candida albicans
gctgatccattatctggtgtcttgtccttcttaaaaatgttccgaattgaatgttcctttgtcat

SEQ ID NO: 3091 - DNA, 65 bp, Candida albicans
cctctactgactcttgaacgtttgtaagtgccggttgtttttttcgaatcttgagtagttgacat

SEQ ID NO: 3092 - DNA, 65 bp, Candida albicans
catggcggggatatgtaaactggttttggcaatcgcaattgcagcctcaatgttcgaatgatcat

SEQ ID NO: 3093 - DNA, 65 bp, Candida albicans
gtttctctaaagacaattaagaatgtctggattgagaagtactcttcaaatgaagtacccgccat

SEQ ID NO: 3094 - DNA, 65 bp, Candida albicans
gataaccctgccttgattcgtagtttatttgtctcttctaatgataaagatatttcttcagacat

SEQ ID NO: 3095 - DNA, 65 bp, Candida albicans
gatggttggtccagaacactgtaaatggatcgtatacctgtgctaaatcccaatctactcaacat

SEQ ID NO: 3096 - DNA, 65 bp, Candida albicans
tctgaatttccatgggcatctgaataatcagtttttgtgggtgttaataaggactgccttgtcat

SEQ ID NO: 3097 - DNA, 65 bp, Candida albicans
ctattcttgatagttttattgccgactttaattggtttgaataaatttgaattggagattgtcat

SEQ ID NO: 3098 - DNA, 65 bp, Candida albicans
ggtttaatgtcattgttggtagtatcaatgtcttgatatttttctaaatcgtcttgttgtttcat

SEQ ID NO: 3099 - DNA, 65 bp, Candida albicans
atattgattggtataacatctttattgtaaacatcaatgtctgaattccaaataacttgtgccat

SEQ ID NO: 3100 - DNA, 65 bp, Candida albicans
gtggtcaccttatgagtctctagattggatatgaattgtctatttaatgttttcaatttactcat

SEQ ID NO: 3101 - DNA, 65 bp, Candida albicans
tcatcatcatcatcatcactaaaatcactaaaatcatcttttgtaaatccaaatgaaaatgacat

SEQ ID NO: 3102 - DNA, 65 bp, Candida albicans
tcggaaaatgctaaagtaccattttcaacttcaacgtaatcagttggatctatagtagttgccat

SEQ ID NO: 3103 - DNA, 65 bp, Candida albicans
gttttagcagtaattaatgttgagaaaaaaaggaaaactaaagaaaaaattgataaacttctcat

SEQ ID NO: 3104 - DNA, 65 bp, Candida albicans
tagtttttaggagaagtgtctaataaagtacaagaagttgttaataatctctttaatattagcat

SEQ ID NO: 3105 - DNA, 65 bp, Candida albicans
tcagtagagattttatcaccaaaagattttaaatcttttgtaaaattggagaaattgaatgacat

SEQ ID NO: 3106 - DNA, 65 bp, Candida albicans
gaggcgagtttaaggtctaaaactgaattataggatcttggaacgttagttggggattgtgacat

SEQ ID NO: 3107 - DNA, 65 bp, Candida albicans
aaatcgtcaaattcatctgcttcataatagttatctatgtctgatcctgattcataatcactcat

SEQ ID NO: 3108 - DNA, 65 bp, Candida albicans
tctgctaaatatgaagattgacaaaatgatcttccctgtataactaatatatttcgtcttatcat

SEQ ID NO: 3109 - DNA, 65 bp, Candida albicans
ggaaaaccgttagaggaatcatcaatagtgttgtgaacagaaggagtctgttgaattggagtcat

SEQ ID NO: 3110 - DNA, 65 bp, Candida albicans
ctggtgagtcttgcagttgactgacgaataagacctgaagatgatctagaaatagttctatacat

SEQ ID NO: 3111 - DNA, 65 bp, Candida albicans
gggatatctttaatttcagttaaatagttatccttaatggaaattggaacaacagcggccttcat

SEQ ID NO: 3112 - DNA, 65 bp, Candida albicans
ccattgtctatagcaacactcgctgcctccaccgtcttgataccacaaatcttaactactttcat

SEQ ID NO: 3113 - DNA, 65 bp, Candida albicans
gtgacaaatgtcggcgagtcatcacaggtagtagaaatatgaataataatataaatatcactcat

SEQ ID NO: 3114 - DNA, 65 bp, Candida albicans
tgattggcaaatatgttacccagtgaagcaccatttgcaattgttgaacttccgaatgatgacat

SEQ ID NO: 3115 - DNA, 65 bp, Candida albicans
ggaagtggattttcaatagatatcttttcaacatcataagttatattatcattcttcttcagcat

SEQ ID NO: 3116 - DNA, 65 bp, Candida albicans
ccagctaaccttttaattgtttcttgaacgtcttctggttcttgagtaacagcagtaggagccat

SEQ ID NO: 3117 - DNA, 65 bp, Candida albicans
tatgtcaatttcaattcattgattatatcgtccaaagtagtagacacagagtgcgcatcagtcat

SEQ ID NO: 3118 - DNA, 65 bp, Candida albicans
ataatgtgtctattatgttcttgaacatcagcactagtgatagaatgagtatcagcagcagtcat

SEQ ID NO: 3119 - DNA, 65 bp, Candida albicans
gtgtcaagaaagctgtgagacggacgtctagaaagtaaagaagtattttcgtcttcctcaatcat

SEQ ID NO: 3120 - DNA, 65 bp, Candida albicans
tgaggggtaacggtggtaccttgaaatcctccacataataattgtccagcataaaatgtggacat

SEQ ID NO: 3121 - DNA, 65 bp, Candida albicans
tcatcatgagctctatgtacaacattgaatgtggtggcggttttcttattgaatcttctaggcat

SEQ ID NO: 3122 - DNA, 65 bp, Candida albicans
aatgggaaaatcgacccaacagaaaacgacaaaaataaactaaaagcaaacaatagacttgtcat

SEQ ID NO: 3123 - DNA, 65 bp, Candida albicans
gtgtcgacattttccgcttctgtagaagctaaagatgaaggtatggttgcttcattatccatcat

SEQ ID NO: 3124 - DNA, 65 bp, Candida albicans
gagttagggcctttaacaccactttgagagcttgaaccttgtttagatctttgtcttctagccat

SEQ ID NO: 3125 - DNA, 65 bp, Candida albicans
gctctgttagttgagtcatttggatcagtaatgataacacggtcttcaagctcttcaactggcat

SEQ ID NO: 3126 - DNA, 65 bp, Candida albicans
aatcttgctactcttgtgaatctagttgaagatgcaaatacccctcgacttatagaattgaacat

SEQ ID NO: 3127 - DNA, 65 bp, Candida albicans
aaaatgtttttagccaaagcaccgactgataataataaaactaaagcggaagttaagaattgcat

SEQ ID NO: 3128 - DNA, 65 bp, Candida albicans
cgatcataatcttcgagaatatatcgattcaactggttttcctgtatcagttcacttgattccat

SEQ ID NO: 3129 - DNA, 65 bp, Candida albicans
gcatccggtgtgggactcttagacttgagcaactgagaagtggttttggatttgttatttgacat

SEQ ID NO: 3130 - DNA, 65 bp, Candida albicans
tgaagcaattttgcccatttcgtttttcctgaacaaggatacccggtaaatataatcaaaggcat

SEQ ID NO: 3131 - DNA, 65 bp, Candida albicans
gttaagactaaccgtattcttcgactattcaatgttggcatagttgccaatggtttcttaatcat

SEQ ID NO: 3132 - DNA, 65 bp, Candida albicans
gcattaacttgagttggcttgaattgactagctgaatagtcttctatcccatctaacaaatccat

SEQ ID NO: 3133 - DNA, 65 bp, Candida albicans
aaatatacagcgtatcctgcaatagctgcagctgcaatagcagttatagttaatcctttgttcat

SEQ ID NO: 3134 - DNA, 65 bp, Candida albicans
tcaaattgtttgagatcatcgacgtttggtttttctaaaaataataccttttgtttgatagtcat

SEQ ID NO: 3135 - DNA, 65 bp, Candida albicans
ttcccgggtatattgtttaaatcatccaacgtattaaagtttaaatttatatagttgtcatccat

SEQ ID NO: 3136 - DNA, 65 bp, Candida albicans
tatgaagtatatgataaaagcaagcccaaacctagtttagacttaattgataacggttgaagcat

SEQ ID NO: 3137 - DNA, 65 bp, Candida albicans
ctagtcaaatagttaaaaacttccagtttttcaaaacgatcaagtatttgatcaaaattttccat

SEQ ID NO: 3138 - DNA, 65 bp, Candida albicans
acacataaggattccaatgatttggtgtaaggaagggaataaacggaacatacaatttctctcat

SEQ ID NO: 3139 - DNA, 65 bp, Candida albicans
ccagattcaggatcaaattctgaatagcctcttcgaggactagaactatctctaaaattagacat

SEQ ID NO: 3140 - DNA, 65 bp, Candida albicans
tatatatctctaactttacctctagcgattaatgggaaagtaccttctaagttggttgaagtcat

SEQ ID NO: 3141 - DNA, 65 bp, Candida albicans
tcctcttctgcctgggcagcgtaatcatacaatgccttgtaaacacctatatatatagacagcat

SEQ ID NO: 3142 - DNA, 65 bp, Candida albicans
gctaaacgataccatttgggccgttcataatgcaaatccaacgatgatgatgatgatggtgccat

SEQ ID NO: 3143 - DNA, 65 bp, Candida albicans
aacgctgctattcctaccccaaatgcaagcaagggtgttgtttttctgactaatgatctgaacat

SEQ ID NO: 3144 - DNA, 65 bp, Candida albicans
ttaatgaagatatacttgtgacgacgacgaaacaatcgtagcctataagtaagttgttgaaacat

SEQ ID NO: 3145 - DNA, 65 bp, Candida albicans
gatgtagtatcagcatctataatgtcattactgatttgaggtgataaatttggactgtgactcat

SEQ ID NO: 3146 - DNA, 65 bp, Candida albicans
atcatcttgattcgtgactcatcgcccaagcatttagcgcatattgaaaatatatctgtactcat

SEQ ID NO: 3147 - DNA, 65 bp, Candida albicans
tctgctgctgaaactgatgtcaataaggcagcgactattggtaaaagaaatgacttaatttgcat

SEQ ID NO: 3148 - DNA, 65 bp, Candida albicans
aactggttagccaattcaaataactttctaggatcattacgttggaaagtttcaagtttgtccat

SEQ ID NO: 3149 - DNA, 65 bp, Candida albicans
ccatgttttcctgtaattgtcttaggtgctttaagtaaacctgatcgtgatttctttttagccat

SEQ ID NO: 3150 - DNA, 65 bp, Candida albicans
tgttgaatttctttatcaagattatttgtagtagttcccttaaataaatttttaacaatattcat

SEQ ID NO: 3151 - DNA, 65 bp, Candida albicans
gtgttgtatttcaaagattgagtggctaatttagcactcctggtgactgatgataatgatgacat

SEQ ID NO: 3152 - DNA, 65 bp, Candida albicans
ttttcagataatgcattttcccctgccaggtgttcagtactcttgtctatgttctgtttcgacat

SEQ ID NO: 3153 - DNA, 65 bp, Candida albicans
attgcatttgaaagtgattgtaaattaccactttctacatcgatgatatggattgttttcgtcat

SEQ ID NO: 3154 - DNA, 65 bp, Candida albicans
ttactactatttctaatactagttctgatgacttgtctaatcacacagggagttctccttaacat

SEQ ID NO: 3155 - DNA, 65 bp, Candida albicans
gaaaactcgtcaatagattgcttatcttctggagaagatataacaggcaaaatagggaatatcat

SEQ ID NO: 3156 - DNA, 65 bp, Candida albicans
gcgagataaaagaaaaaaaaaaatgaatgacaaaaaaaaaattccctctttttctttttccacat

SEQ ID NO: 3157 - DNA, 65 bp, Candida albicans
gttacagattcgggataaattgcttcaatagcacttatctcatcagttaattcttcaactgtcat

SEQ ID NO: 3158 - DNA, 65 bp, Candida albicans
taagcatcatcttttttattggctccttgaggaggagctgctggatcaaacccaaaaaatgacat

SEQ ID NO: 3159 - DNA, 65 bp, Candida albicans
ttgttattatgaggagggacttcagtagtttcaatgacttcagaagatttaacaagatcactcat

SEQ ID NO: 3160 - DNA, 65 bp, Candida albicans
atcaagattctcatttctttgttaccaaagagattagcaaataatttggaaaatgataaacccat

SEQ ID NO: 3161 - DNA, 65 bp, Candida albicans
gttgttgttgttgttgttgttgttgttgttgttgttgttgtattgattgattgatttgttgtcat

SEQ ID NO: 3162 - DNA, 65 bp, Candida albicans
ccgccgtagcctccaccgtaactacctccgtttctattattatatcctccgttattgtatgacat

SEQ ID NO: 3163 - DNA, 65 bp, Candida albicans
gatgaggaacttgagttttcaaacaagtcctcgtttctagtaggtttttcaggatttgtagacat

SEQ ID NO: 3164 - DNA, 65 bp, Candida albicans
aagacaaatgttcgcaatggcaatgccctgcttttcattattagtcgtccatttctagggatcat

SEQ ID NO: 3165 - DNA, 65 bp, Candida albicans
tgctgaggttgctgaggttgttgttgtggtggtcgtggttgcggaggtgcaggtctagagttcat

SEQ ID NO: 3166 - DNA, 65 bp, Candida albicans
atcaaagacatcaactgagagatctcagcagtgaattcgtgagtttcaacttttgcgtcagccat

SEQ ID NO: 3167 - DNA, 65 bp, Candida albicans
tcagcattagcattagcagcaaataacaaagtagatgctatagtagcgagtgtagtgaacttcat

SEQ ID NO: 3168 - DNA, 65 bp, Candida albicans
tcaagatcttgtacagctgattcaaaatttgaatcgctatggaatgacgtgttaggcagtgacat

SEQ ID NO: 3169 - DNA, 65 bp, Candida albicans
cgttgaaacacaaattgctgtgtaatttggtgaatgaattgatcagatgatcctatgggtggcat

SEQ ID NO: 3170 - DNA, 65 bp, Candida albicans
tcacatacaattttcagtgatcctttaagagctaatttagatgatggttctaatgatgatggcat

SEQ ID NO: 3171 - DNA, 65 bp, Candida albicans
tctggctctctggtacctaacaaattaagattgggaccattaatgagaagtactttcttaaccat

SEQ ID NO: 3172 - DNA, 65 bp, Candida albicans
cttgcagttgtgattgagtcttctgaaatatctattactttgagtggatttgacattttggtcat

SEQ ID NO: 3173 - DNA, 65 bp, Candida albicans
aaagtggagctggtaaacaatcttgttgatttagtagatgaagatgttataatttgtttaaacat

SEQ ID NO: 3174 - DNA, 65 bp, Candida albicans
agtgtaactgtttgatcaaaatcattagcatatgaatatgatgagttttctttggtaagtatcat

SEQ ID NO: 3175 - DNA, 65 bp, Candida albicans
ttcactggagatcctggtcttggtggatttggggtaacgactttagcaattgatcttactgacat

SEQ ID NO: 3176 - DNA, 65 bp, Candida albicans
atcctatttgcttgttttaatgggacaccaattggatatcgataagatacaagtctactgaacat

SEQ ID NO: 3177 - DNA, 65 bp, Candida albicans
tcggatgaatctaatgaatctcctatataattaccaaattcatcatataaatcttcatcatccat

SEQ ID NO: 3178 - DNA, 65 bp, Candida albicans
atcactatggatgaagtaaatgccagattggcagctgcttgtgccctagtcactaaattaaacat

SEQ ID NO: 3179 - DNA, 65 bp, Candida albicans
cttatgttatggttttttttttcttctctcagcttttctctttctttacattttgctcgcctcat

SEQ ID NO: 3180 - DNA, 65 bp, Candida albicans
acagaagcaaccttcttggactttttcttcttcttcaaacttggatcaaaacctaaatcagacat

SEQ ID NO: 3181 - DNA, 65 bp, Candida albicans
atcttgttattaagttgatattccaccttaccagatggcttgaaaattatcaatgactgagacat

SEQ ID NO: 3182 - DNA, 65 bp, Candida albicans
ttaacaaaactttcagtagatggagtttgtacaggagtgttagtttctggaaatgtttcagacat

SEQ ID NO: 3183 - DNA, 65 bp, Candida albicans
ttggatggatcggctttggttaattcagtgaactgttgttctgactcgatttcaataactcccat

SEQ ID NO: 3184 - DNA, 65 bp, Candida albicans
gtattattgaacgataattgttttgacaagattgataatcttgataaggcattaaaatttttcat

SEQ ID NO: 3185 - DNA, 65 bp, Candida albicans
ccaactgatttacagtgtgattccccatatgtagtaactttaaataatgttccaaaggacgacat

SEQ ID NO: 3186 - DNA, 65 bp, Candida albicans
gtgattttttttaattctctttgaccaccaatacgtgggaaacctaagacggaagattgaaccat

SEQ ID NO: 3187 - DNA, 65 bp, Candida albicans
aggaaaagtttggatgaaaaaccgttcggtagtattctagttattgaagatcttataggaatcat

SEQ ID NO: 3188 - DNA, 65 bp, Candida albicans
aagcagattattaaagattttggtctgactaatattctacggccatctttaaatatgctacccat

SEQ ID NO: 3189 - DNA, 65 bp, Candida albicans
acattagtcgattccaaagatgacgatgatccattgttggaatttaaatagccagaagatctcat

SEQ ID NO: 3190 - DNA, 65 bp, Candida albicans
tgaagaacattaggtaaatctgaacctggtgcactgtatgttgttgctttaccggtgattgtcat

SEQ ID NO: 3191 - DNA, 65 bp, Candida albicans
tcagtggagtattccaataatttgtggacgttttctctaacgccagaactggtgattttagacat

SEQ ID NO: 3192 - DNA, 65 bp, Candida albicans
tttttagcaatggtagaggccgttgaataccgtactcggtgaattatttcaacgtgttttatcat

SEQ ID NO: 3193 - DNA, 65 bp, Candida albicans
aattcctggttgtagaccttatttacggatctgccataatatatgggtgcttcttgttgatccat

SEQ ID NO: 3194 - DNA, 65 bp, Candida albicans
aaacttttggttgctatcataactaggtaatataggtaatgcaagcccatgctttctaaaatcat

SEQ ID NO: 3195 - DNA, 65 bp, Candida albicans
gaatctaaaaatttcagcaatgcattattgctattcatagagtttgtaaatggccaaaaagacat

SEQ ID NO: 3196 - DNA, 65 bp, Candida albicans
acaggagtactgctgtttttataagtataagctttgaaatttaattcgggagtcgttaaagtcat

SEQ ID NO: 3197 - DNA, 65 bp, Candida albicans
gtagcagtgtcagtgtgggcagaatcagaagcttgttgggttaacaattcagcatcgatttccat

SEQ ID NO: 3198 - DNA, 65 bp, Candida albicans
aaccttcttttggaatccgttaatagtccattgaggtctccaatcaacagctgaacattagacat

SEQ ID NO: 3199 - DNA, 65 bp, Candida albicans
aattcaggataaatatcacttggattaatttcaatatttttccaagttaaaacgtctttgtccat

SEQ ID NO: 3200 - DNA, 65 bp, Candida albicans
gtattatcaccaactttaattggttgaaatactaatgaatcttttaatgggttagaatttgacat

SEQ ID NO: 3201 - DNA, 65 bp, Candida albicans
aaacatacatctgaaattatatctagattcttcggagtttgtaattcaacaaatggagtagtcat

SEQ ID NO: 3202 - DNA, 65 bp, Candida albicans
tgccaaataaatgctgaagtaatgatcggtaataaacccaattctaataaagtacctttattcat

SEQ ID NO: 3203 - DNA, 65 bp, Candida albicans
ggtttatatgtgaaaagtaatgatacaagcaatatggagagtgttgaaatgaataatgtcttcat

SEQ ID NO: 3204 - DNA, 65 bp, Candida albicans
gtcatgttttcgttattggttgaatcaaaaactgtggaatttgtattattgattgtgaaagtcat

SEQ ID NO: 3205 - DNA, 65 bp, Candida albicans
gttgcgggttcatcataatcactttcctcatcactttgtacaaaaagtccttctccttcttccat

SEQ ID NO: 3206 - DNA, 65 bp, Candida albicans
ccagcgccagtacctgattggtttgtatttaatgataatggttggtttcgcagtttggttgtcat

SEQ ID NO: 3207 - DNA, 65 bp, Candida albicans
agtgtgagatcttcctgttctcgtgaaccagatggtcttggtgaatgtgtccgtggaaacgacat

SEQ ID NO: 3208 - DNA, 65 bp, Candida albicans
tcgtcaatggctgcttgcattgcaacctcatctacttcttgcttttttatttgctggcgaggcat

SEQ ID NO: 3209 - DNA, 65 bp, Candida albicans
ttgactaaagtttgagcaataaaaccagaagcaccagaaacgaaaactgtagtagatgaagacat

SEQ ID NO: 3210 - DNA, 65 bp, Candida albicans
atattttccttttgctgctctagtagttgaatattagcagtttgtggcagtttctgtatcaccat

SEQ ID NO: 3211 - DNA, 65 bp, Candida albicans
gggagttgtttggcaaatgtacatgtgaaaagaaggaaactgaaacttaatggtagtagtttcat

SEQ ID NO: 3212 - DNA, 65 bp, Candida albicans
tcacacaaagcaataaaagtatcaatttgtttgtactcaactttggaagggaaaattgaatccat

SEQ ID NO: 3213 - DNA, 65 bp, Candida albicans
ttacggccagaagcctcaattaaagcaaatgttagcaagaaagttattaactgaaaaaacttcat

SEQ ID NO: 3214 - DNA, 65 bp, Candida albicans
aacgtatcgggagaactaaatattttatttagatgtgtcgtggggtcatacgtcggcgagtccat

SEQ ID NO: 3215 - DNA, 65 bp, Candida albicans
acattattggtggagctggaggcagaggtcctatctggtgttaatcgggaattgttggatgacat

SEQ ID NO: 3216 - DNA, 65 bp, Candida albicans
ttagtatcggaatgtgaattttgatcaattctcttgtcaggttctagatttggaaaatctcccat

SEQ ID NO: 3217 - DNA, 65 bp, Candida albicans
tcataatcgtcttcggaatcgtccgaatgcattaattgaggattgaattctgagatgattaacat

SEQ ID NO: 3218 - DNA, 65 bp, Candida albicans
gatgatggaccagtagttgttggtttatgtttcttttgtggtggttgtgatggtgattcagacat

SEQ ID NO: 3219 - DNA, 65 bp, Candida albicans
ttccttctggccagaaatattagattgaaaattctaataaaatattgtggaattgtatttgacat

SEQ ID NO: 3220 - DNA, 65 bp, Candida albicans
cgaattccagaattgatactttgattttgttcttctgctaaaaatgtcgaatgataagctggcat

SEQ ID NO: 3221 - DNA, 65 bp, Candida albicans
cataatacagctggatttcgtgagtatcgattgtctgactgtgatgaatatgaggacctgttcat

SEQ ID NO: 3222 - DNA, 65 bp, Candida albicans
acaactcgttgagcagaggaatatcccccagcaacattcttaattgagcgtacaagctttgacat

SEQ ID NO: 3223 - DNA, 65 bp, Candida albicans
ctcgtgtgtaaagttgtcctttcatttaaagcttctgtcttcaaatcaaaatcatttaaaaccat

SEQ ID NO: 3224 - DNA, 65 bp, Candida albicans
gccgttgacgtcgactctttcaacgacacattattatctgatgataacatagaagagatgttcat

SEQ ID NO: 3225 - DNA, 65 bp, Candida albicans
gtgaaaaaaaaaaataaaaagttaaacatacactggtaaatctgaattcttggattttttgccat

SEQ ID NO: 3226 - DNA, 65 bp, Candida albicans
ggggcagagtatttggagacggccttaaatccgtcagtagttcctgatggtaatacaatagacat

SEQ ID NO: 3227 - DNA, 65 bp, Candida albicans
ataggttgtggaccgtattcttggggatttgattcatttggtgttattgttgtagatgtgttcat

SEQ ID NO: 3228 - DNA, 65 bp, Candida albicans
cagccagcaaaccctaaaaatggagcaaatgatgggtaatattcgtctcccaatgtttctgacat

SEQ ID NO: 3229 - DNA, 65 bp, Candida albicans
ggtaacaatttttctggtaataagttttctggaccaatttcgattaataattctttgaatgacat

SEQ ID NO: 3230 - DNA, 65 bp, Candida albicans
gtagaatcccaaaatttaattaatttacttaatgtaggatgataaatcaatgtgtcaacaaccat

SEQ ID NO: 3231 - DNA, 65 bp, Candida albicans
tcgattttaggagggaatgtcaataaaagtattgcaatcaaaataaataccaaatgccgtagcat

SEQ ID NO: 3232 - DNA, 65 bp, Candida albicans
ttccatttatctttgacacgaataccgtcagacaaaaaacggattgaagttaatgttttcctcat

SEQ ID NO: 3233 - DNA, 65 bp, Candida albicans
gaagtcctattactggtaggataaaaagtagtagttgatgtactagcagttgatgaaatactcat

SEQ ID NO: 3234 - DNA, 65 bp, Candida albicans
ggtgataatgatgatgatgacttgttgataaatcttgatgttgataataacgatcttctaaacat

SEQ ID NO: 3235 - DNA, 65 bp, Candida albicans
attgctggcgagcctccgttctgattgctggaattcaagaaatctggataattcattgcagacat

SEQ ID NO: 3236 - DNA, 65 bp, Candida albicans
ggaattgaataactaataattatatcgcctggtttatcaggtatgaaagttgaattgatattcat

SEQ ID NO: 3237 - DNA, 65 bp, Candida albicans
atcttgttcagaaacatctctgctaaatgaggattaaatgctcgtgcctttgtaagtattctcat

SEQ ID NO: 3238 - DNA, 65 bp, Candida albicans
tcggtatcatattgttggttattctcaaccagatatgtatcataaaactctccgaattgagacat

SEQ ID NO: 3239 - DNA, 65 bp, Candida albicans
ggggctatttcagttgtcgaggatttgtcttctatatttttggatagtatagatggtgatgacat

SEQ ID NO: 3240 - DNA, 65 bp, Candida albicans
cggattttccttcttttgcattctttacagccacctcgactataagctctcttggaagtagacat

SEQ ID NO: 3241 - DNA, 65 bp, Candida albicans
ttgtatttttgtcttttgaatttctcccctgttgaatcttctataaaaggtagcgtgccggacat

SEQ ID NO: 3242 - DNA, 65 bp, Candida albicans
tcaaaactaaatgtaggatggtgattggtaacggtagttgaataactcgatagtggtgtagtcat

SEQ ID NO: 3243 - DNA, 65 bp, Candida albicans
gatggttcagattgacgtctatgagtgctgaccttgcttatgaatttatcgaaccctaatgtcat

SEQ ID NO: 3244 - DNA, 65 bp, Candida albicans
tttagatgtggttgtggttgtggttgtggttgtttattgttattggatgttattgctactgacat

SEQ ID NO: 3245 - DNA, 65 bp, Candida albicans
cctctttcaggtggtgttggagtccaagtacggaaattacctcctataaaaaaagaaaatagcat

SEQ ID NO: 3246 - DNA, 65 bp, Candida albicans
gaaacagattttgttggcttcttagtcggtaaaggttccgattctgttgcttttcttttggccat

SEQ ID NO: 3247 - DNA, 65 bp, Candida albicans
aattgggcttcaaagtttcttctttgtatctccaatgcctttatatattcatcatcttcactcat

SEQ ID NO: 3248 - DNA, 65 bp, Candida albicans
ttatgttttagtattattttagacccataacattttcgtatatgaacttcttgaagtctcaacat

SEQ ID NO: 3249 - DNA, 65 bp, Candida albicans
aatgcagcaaccttgaattcccaattttttagtaatgccttccaggacagactttttgacgtcat

SEQ ID NO: 3250 - DNA, 65 bp, Candida albicans
attgttgctttggcagttaacgccactattgtggcccctaatccaacaattataggtaacaccat

SEQ ID NO: 3251 - DNA, 65 bp, Candida albicans
attggtttaatattgtctaaatctaatggtaaagcttcagacttagactttttctttcccgccat

SEQ ID NO: 3252 - DNA, 65 bp, Candida albicans
gtcttgtcattgaatcgttggaatttagatgccaagttgttctcagtggcattaatgtctttcat

SEQ ID NO: 3253 - DNA, 65 bp, Candida albicans
tatataagatcaagatctctggttcttcttttggttttatatcttttaacactatatcttcccat

SEQ ID NO: 3254 - DNA, 65 bp, Candida albicans
ggtgtggtggttgaagaagtaaagcaagctgatgctttcttgtcttttttctttagtgttgccat

SEQ ID NO: 3255 - DNA, 65 bp, Candida albicans
acaaaaactcctatgtgacgactagatctaaacaaaggtctagttattatcgaaaacttattcat

SEQ ID NO: 3256 - DNA, 65 bp, Candida albicans
ttcttgttagaacctaatggttgatggaaatcagaagcagcaaaatatctaaatgttgtactcat

SEQ ID NO: 3257 - DNA, 65 bp, Candida albicans
gataatgttggtcttgctaaaatgaaattagctgccttaacgacagatgtcatagattgaaccat

SEQ ID NO: 3258 - DNA, 65 bp, Candida albicans
ttcatcgctgtctgagccgaagagtagcacctgactagtgacacggatcttgagtagatgctcat

SEQ ID NO: 3259 - DNA, 65 bp, Candida albicans
acgaataatggtgatgatgttaaaagtgtgagtataataggaataaaatacctcgaaaatatcat

SEQ ID NO: 3260 - DNA, 65 bp, Candida albicans
gaagatgtcgatgcaggagttgtggaataggttcttataaccttgtgaaacgtcgaccctctcat

SEQ ID NO: 3261 - DNA, 65 bp, Candida albicans
tgtgaagaatagtatctaccaagtgattttcttactgatcgtagtagtatcagcctactaaacat

SEQ ID NO: 3262 - DNA, 65 bp, Candida albicans
gttaatggagtgattggtggtaagattgatcttttagttggtgtttgttgtaagtgcatcatcat

SEQ ID NO: 3263 - DNA, 65 bp, Candida albicans
ttatcaattataaattgaatattttcctcagcttgacgccattttttcaaaaatggttcccccat

SEQ ID NO: 3264 - DNA, 65 bp, Candida albicans
tacttagtttgctggtagatttttagttcaagatttttgtttttttggtaagaaaaattaaccat

SEQ ID NO: 3265 - DNA, 65 bp, Candida albicans
cgagatgatgttggggcgaccactgttttgagaattgaagtagtagattttttaaatgcaaacat

SEQ ID NO: 3266 - DNA, 65 bp, Candida albicans
gcagcttttaatccagaaaccccggccccaataattaggacctttgtagattttgtccttgacat

SEQ ID NO: 3267 - DNA, 65 bp, Candida albicans
gcagcagtggtagtggtggtgttattggtagtaagtggtgattcagtaggaattgatgtagacat

SEQ ID NO: 3268 - DNA, 65 bp, Candida albicans
ctaataatgtttatacatcgagatggtaaatttgaatgccttagtattaggctacgtctgtacat

SEQ ID NO: 3269 - DNA, 65 bp, Candida albicans
gtggcttcctttgccgtattcaatggatctgttatacgtgctatagcaaataattcgtaatacat

SEQ ID NO: 3270 - DNA, 65 bp, Candida albicans
ctacggaaattgattaatcgacttttataaataggagataatctaatttggcgaaatctcaacat

SEQ ID NO: 3271 - DNA, 65 bp, Candida albicans
gattgtaatgattttttagcatttttataagctgtttcacctaatataaactccgatgatttcat

SEQ ID NO: 3272 - DNA, 65 bp, Candida albicans
tacggcacatatgtgtttggtaatatattcttatatgatggtgtttgctgttctaactttgacat

SEQ ID NO: 3273 - DNA, 65 bp, Candida albicans
gtagattcattggcaccaacactacttagtataaatagaaaaatatatatccaaaatggtttcat

SEQ ID NO: 3274 - DNA, 65 bp, Candida albicans
tcattatcttctgggaaataaaagaattcattaaactcatccaagaatgttaatggatctgtcat

SEQ ID NO: 3275 - DNA, 65 bp, Candida albicans
actttgactgtttttgtcatttttccttgggaaatgacgacccccacaaaattttgtcttgccat

SEQ ID NO: 3276 - DNA, 65 bp, Candida albicans
actattgatattggacaacataatattagaagggccagatagaaagataaatctgattcaaacat

SEQ ID NO: 3277 - DNA, 65 bp, Candida albicans
ttgaataaagtaggcgttgacaaattgtcatatcctttgagtggttgtttggtgagatctgtcat

SEQ ID NO: 3278 - DNA, 65 bp, Candida albicans
ttattattattattattaccaatatcaccagtgagattggttgattctggattatcttgtggcat

SEQ ID NO: 3279 - DNA, 65 bp, Candida albicans
atggtataccgtttatcttggtatgatgcctgtttcttgtaataaggtgttgtattttcagtcat

SEQ ID NO: 3280 - DNA, 65 bp, Candida albicans
gttgagggtgtagttgaggatgcaactgacagtaaatcgctgtcatgtaattcttcaggtggcat

SEQ ID NO: 3281 - DNA, 65 bp, Candida albicans
gcagcatttctttgtaattctgctaatcttgcttgtctaatagcatttaattctgcgtcatccat

SEQ ID NO: 3282 - DNA, 65 bp, Candida albicans
tcatagttggagtggtttgcattaaatgaattgacagcagttgaatttgctgatttcgttgacat

SEQ ID NO: 3283 - DNA, 65 bp, Candida albicans
tcatcttccctggtagtgctcttatactttttatagctcttcttcaatggtgtagtctccctcat

SEQ ID NO: 3284 - DNA, 65 bp, Candida albicans
gagactcttcccatggctagtcggaacgattccagaagacatgatgtggagtacttgcggagcat

SEQ ID NO: 3285 - DNA, 65 bp, Candida albicans
ttgaataaagtaggcgttgacaaattgtcatatcctttgagtggttgtttggcgagatctgtcat

SEQ ID NO: 3286 - DNA, 65 bp, Candida albicans
aacaacgccaacaataatttaattggcaacgtaacaagatcaaataatgctcttaaggaaatcat

SEQ ID NO: 3287 - DNA, 65 bp, Candida albicans
agtaagacggccaataacttaatagggatactgagaagaaccttccaacctttaaatgaaagcat

SEQ ID NO: 3288 - DNA, 65 bp, Candida albicans
ggaacatccagtaacaactcttgattattgaatttttcaaatactgaaagaggtatcctttccat

SEQ ID NO: 3289 - DNA, 65 bp, Candida albicans
tggaattcatttgaatcagagtcttgtgcatggttattggtagtaacttttgacgtactgggcat

SEQ ID NO: 3290 - DNA, 65 bp, Candida albicans
gcgccagcaaccgcatattgtctgtttttaccgaaaaatgattttatctttgatttcatagacat

SEQ ID NO: 3291 - DNA, 65 bp, Candida albicans
ttacgcctcacatctgtttcagggttatctatgctattagctgttatcgttatgctttcactcat

SEQ ID NO: 3292 - DNA, 65 bp, Candida albicans
ttatgttctgatcgagtaaaagccctagcacaaaaggcacaaatgtatttcttttgtgcagccat

SEQ ID NO: 3293 - DNA, 65 bp, Candida albicans
atgaataatgaaatatggattgtaaattctgggaattgagggaattttataacttcagacgtcat

SEQ ID NO: 3294 - DNA, 65 bp, Candida albicans
acatcttcatttgaatcttgaaacaatttccaaatctcttctaaatctttatcatctttactcat

SEQ ID NO: 3295 - DNA, 65 bp, Candida albicans
tttgaataaggacgcttaataatataagttggctctctatcaccccaacttagaacattctccat

SEQ ID NO: 3296 - DNA, 65 bp, Candida albicans
cgttttaattctgtgtttgaaactgaataacgggttgtttcggcaaattgtgtggctaatgtcat

SEQ ID NO: 3297 - DNA, 65 bp, Candida albicans
tgtaatttctgtttgttggcctcgatgctgggttgatagtaaaacttctgtgtggcaacggtcat

SEQ ID NO: 3298 - DNA, 65 bp, Candida albicans
gatgttgacggtagatgacattttcttaagttgatatgtagatcccttgcaaactgtcgtatcat

SEQ ID NO: 3299 - DNA, 65 bp, Candida albicans
aagcatattgaagtagaagacaaatgtctcgactgcagtattatattagacttccccacaaccat

SEQ ID NO: 3300 - DNA, 65 bp, Candida albicans
gatgctaataaaatgttttctgttaatgatttagtaacaattttgaaatttggtggatatcccat

SEQ ID NO: 3301 - DNA, 65 bp, Candida albicans
gtagtggttaatcttgaagtgaatttccaaacataacctcctgatctaactaatgattcaaacat

SEQ ID NO: 3302 - DNA, 65 bp, Candida albicans
caagatattaatgctgcaagtaagttttcaccacctggtgtagtttctggtttattagttggcat

SEQ ID NO: 3303 - DNA, 65 bp, Candida albicans
ctttcaattatagggaaatcagtattatttttggatatagtttgtaaaatttgatcatgattcat

SEQ ID NO: 3304 - DNA, 65 bp, Candida albicans
aatgataatggtatgaaatcattaaataatatttcatgagtttgattaggtgtttcttcacccat

SEQ ID NO: 3305 - DNA, 65 bp, Candida albicans
gagtagatccctaaatacataagagctaagagcccacatattatcaccaatgcatcttgagtcat

SEQ ID NO: 3306 - DNA, 65 bp, Candida albicans
tcgataataacccgtttattcacagttagtttctttaggccagacttaaactcgtcaatattcat

SEQ ID NO: 3307 - DNA, 65 bp, Candida albicans
ttacatgtagcacttgcctcctcaagcaactccttgattttctcaagctcttccggataacccat

SEQ ID NO: 3308 - DNA, 65 bp, Candida albicans
tcataagctgatattgattgtgataatgagtttatatataatttcaaattctctatgttctccat

SEQ ID NO: 3309 - DNA, 65 bp, Candida albicans
tgagtgtttccaaataaactcacccccttattgttttgcgtatttttaaaaaaatttgacgacat

SEQ ID NO: 3310 - DNA, 65 bp, Candida albicans
gttttcaccattgaaggttttgatactgaagctcttaatgattttaataaagtagttctaaacat

SEQ ID NO: 3311-4000 - skipped (690 entries)

SEQ ID NO: 4001 - DNA, 23 bp, Candida albicans
tgaaacattcttacacggcatcg

SEQ ID NO: 4002 - DNA, 27 bp, Candida albicans
tgctttcttatcccattttgaattttt

SEQ ID NO: 4003 - DNA, 20 bp, Candida albicans
gccgccgcagcaataagatt

SEQ ID NO: 4004 - DNA, 20 bp, Candida albicans
gtgcgtgtaagctggccaaa

SEQ ID NO: 4005 - DNA, 24 bp, Candida albicans
tcgttgttcgttgatttgatttga

SEQ ID NO: 4006 - DNA, 22 bp, Candida albicans
tttgcttttccatttctgctgc

SEQ ID NO: 4007 - DNA, 20 bp, Candida albicans
atgggtggcccacatgaaaa

SEQ ID NO: 4008 - DNA, 25 bp, Candida albicans
cacccttatccaataggggagtttt

SEQ ID NO: 4009 - DNA, 20 bp, Candida albicans
ctgcctttggtgcccaattc

SEQ ID NO: 4010 - DNA, 20 bp, Candida albicans
tccggacttgtgtcctgcaa

SEQ ID NO: 4011 - DNA, 22 bp, Candida albicans
tcctgttccagttcccctttca

SEQ ID NO: 4012 - DNA, 21 bp, Candida albicans
tttttgtcccggaattggaga

SEQ ID NO: 4013 - DNA, 20 bp, Candida albicans
aagccgtttttcctttcggg

SEQ ID NO: 4014 - DNA, 20 bp, Candida albicans
cgcgctaaacttccttcccc

SEQ ID NO: 4015 - DNA, 20 bp, Candida albicans
tcctcgttcctccccaaagt

SEQ ID NO: 4016 - DNA, 23 bp, Candida albicans
cctgacacgcaaaaagtgaaaca

SEQ ID NO: 4017 - DNA, 26 bp, Candida albicans
cacagagtgaattctcctttccatga

SEQ ID NO: 4018 - DNA, 20 bp, Candida albicans
agggagcagcagcagcaaaa

SEQ ID NO: 4019 - DNA, 25 bp, Candida albicans
tcgttagtccaactttttgcaactg

SEQ ID NO: 4020 - DNA, 26 bp, Candida albicans
tgtatgaaatacctgcgtcaacaagg

SEQ ID NO: 4021 - DNA, 26 bp, Candida albicans
cgtggttatattgatccacacgtacc

SEQ ID NO: 4022 - DNA, 20 bp, Candida albicans
tccgcctatcaaaaagccca

SEQ ID NO: 4023 - DNA, 23 bp, Candida albicans
gagggagctggaatacatttgcc

SEQ ID NO: 4024 - DNA, 21 bp, Candida albicans
ccaacgaagggaagaaatcgg

SEQ ID NO: 4025 - DNA, 24 bp, Candida albicans
ccaccctaccttacctaaacccct

SEQ ID NO: 4026 - DNA, 23 bp, Candida albicans
tggtgatggtgattgtagatccg

SEQ ID NO: 4027 - DNA, 20 bp, Candida albicans
ttgccaatggcgttgtgttt

SEQ ID NO: 4028 - DNA, 21 bp, Candida albicans
aaaggcttttgccgagctgtt

SEQ ID NO: 4029 - DNA, 22 bp, Candida albicans
tttgagcaacaatgtgagggga

SEQ ID NO: 4030 - DNA, 21 bp, Candida albicans
aaccagctttgttcggttgga

SEQ ID NO: 4031 - DNA, 24 bp, Candida albicans
tcaatctcatcaacaggagttgcc

SEQ ID NO: 4032 - DNA, 21 bp, Candida albicans
gcaccatgaaactgaaacggg

SEQ ID NO: 4033 - DNA, 20 bp, Candida albicans
caagcaaaacgccagcttca

SEQ ID NO: 4034 - DNA, 21 bp, Candida albicans
caagggctggataaaccgtga

SEQ ID NO: 4035 - DNA, 22 bp, Candida albicans
ggcacacaaagtcaacccattg

SEQ ID NO: 4036 - DNA, 23 bp, Candida albicans
tgatgctacaaatgccattcctg

SEQ ID NO: 4037 - DNA, 24 bp, Candida albicans
tcaacattgatttgatggagacga

SEQ ID NO: 4038 - DNA, 20 bp, Candida albicans
attggttcatgacacgcccc

SEQ ID NO: 4039 - DNA, 20 bp, Candida albicans
caaaacgacagaaaggcgga

SEQ ID NO: 4040 - DNA, 20 bp, Candida albicans
tgatcggagagccgaacaag

SEQ ID NO: 4041 - DNA, 20 bp, Candida albicans
attgaagggagcggcatcaa

SEQ ID NO: 4042 - DNA, 22 bp, Candida albicans
cagcagacactcacagagacgg

SEQ ID NO: 4043 - DNA, 20 bp, Candida albicans
tccctggagcacgaagacaa

SEQ ID NO: 4044 - DNA, 21 bp, Candida albicans
tgtgttgatgtttggatgccg

SEQ ID NO: 4045 - DNA, 20 bp, Candida albicans
tggctttgacccctttggaa

SEQ ID NO: 4046 - DNA, 20 bp, Candida albicans
ttgggagctgggatcattgg

SEQ ID NO: 4047 - DNA, 24 bp, Candida albicans
gcggaaatacttgatctatcgtcg

SEQ ID NO: 4048 - DNA, 21 bp, Candida albicans
tgtgtcgaaaccagccaaaca

SEQ ID NO: 4049 - DNA, 20 bp, Candida albicans
ggactggccacgagagtggt

SEQ ID NO: 4050 - DNA, 22 bp, Candida albicans
tgacggaattgttctgggattg

SEQ ID NO: 4051 - DNA, 20 bp, Candida albicans
gtcacgtgagagggctcggt

SEQ ID NO: 4052 - DNA, 23 bp, Candida albicans
tcgtgcttgtttttctctttgcc

SEQ ID NO: 4053 - DNA, 23 bp, Candida albicans
ccacatgttggaaaaccaaaacc

SEQ ID NO: 4054 - DNA, 20 bp, Candida albicans
tgaaaaccccggtagacgga

SEQ ID NO: 4055 - DNA, 20 bp, Candida albicans
tccatctatggctttcgggg

SEQ ID NO: 4056 - DNA, 28 bp, Candida albicans
aacttccatcatatttaccacaattgga

SEQ ID NO: 4057 - DNA, 20 bp, Candida albicans
cggcttggagctttctctcg

SEQ ID NO: 4058 - DNA, 20 bp, Candida albicans
gaaggcccaagcttcccact

SEQ ID NO: 4059 - DNA, 23 bp, Candida albicans
cataattgcaaagatgtgccctg

SEQ ID NO: 4060 - DNA, 23 bp, Candida albicans
gccaaactgtattacgtcagcgg

SEQ ID NO: 4061 - DNA, 24 bp, Candida albicans
cccactcatcatcttccaacaaca

SEQ ID NO: 4062 - DNA, 22 bp, Candida albicans
tccaagatgttcgagaacccaa

SEQ ID NO: 4063 - DNA, 28 bp, Candida albicans
tccagattgaataaactttccacaaaca

SEQ ID NO: 4064 - DNA, 28 bp, Candida albicans
tgaacaactacaacaacaacaacaacaa

SEQ ID NO: 4065 - DNA, 24 bp, Candida albicans
aaaccctgcctttcctgtattggt

SEQ ID NO: 4066 - DNA, 24 bp, Candida albicans
tgacaacgccaacgaaaactctaa

SEQ ID NO: 4067 - DNA, 24 bp, Candida albicans
accctcctgtatgaactcacctgg

SEQ ID NO: 4068 - DNA, 24 bp, Candida albicans
tatggcgtcatgaacctccttttt

SEQ ID NO: 4069 - DNA, 24 bp, Candida albicans
ggttgcccttaacatttggatgaa

SEQ ID NO: 4070 - DNA, 24 bp, Candida albicans
aaaataggagcgctctttcttggg

SEQ ID NO: 4071 - DNA, 24 bp, Candida albicans
gaaaataaaataacgccgcaccaa

SEQ ID NO: 4072 - DNA, 24 bp, Candida albicans
taccaacggctgtttcaacacact

SEQ ID NO: 4073 - DNA, 24 bp, Candida albicans
tcaattcgaactgtcatcctgtcc

SEQ ID NO: 4074 - DNA, 24 bp, Candida albicans
aggatgcccaatgtaaagcagtgt

SEQ ID NO: 4075 - DNA, 24 bp, Candida albicans
tttccccacgagcagaattgttat

SEQ ID NO: 4076 - DNA, 24 bp, Candida albicans
taaataagtcgtggaaattggccg

SEQ ID NO: 4077 - DNA, 24 bp, Candida albicans
tcaagggtccaacaaaaagttggt

SEQ ID NO: 4078 - DNA, 24 bp, Candida albicans
tgatgagtttgtttcgatggagga

SEQ ID NO: 4079 - DNA, 24 bp, Candida albicans
cttctccctttccggatgaaagtt

SEQ ID NO: 4080 - DNA, 24 bp, Candida albicans
tcaacggacaatgatttcacgagt

SEQ ID NO: 4081 - DNA, 25 bp, Candida albicans
cccgagaattgaaagtttgtacacg

SEQ ID NO: 4082 - DNA, 24 bp, Candida albicans
ccagaacatgcagtgagtgagtga

SEQ ID NO: 4083 - DNA, 24 bp, Candida albicans
catttccaactagccacgtcgttc

SEQ ID NO: 4084 - DNA, 24 bp, Candida albicans
tttatgcccaatatgtgtcccctc

SEQ ID NO: 4085 - DNA, 26 bp, Candida albicans
ggaaactagtgaaaactcttggtggg

SEQ ID NO: 4086 - DNA, 23 bp, Candida albicans
aggatttgcgttcatacggaaca

SEQ ID NO: 4087 - DNA, 24 bp, Candida albicans
gcaattgccatggctaaaagaaaa

SEQ ID NO: 4088 - DNA, 24 bp, Candida albicans
tccgaaaataagcataggcgaaaa

SEQ ID NO: 4089 - DNA, 24 bp, Candida albicans
tgcccctcttcactatccaaatgt

SEQ ID NO: 4090 - DNA, 24 bp, Candida albicans
ccaaacgctaaaccaaaaaccaaa

SEQ ID NO: 4091 - DNA, 24 bp, Candida albicans
ggtgctgttggtattgtgaatggt

SEQ ID NO: 4092 - DNA, 24 bp, Candida albicans
ctgatgggtgtttgcagctttatg

SEQ ID NO: 4093 - DNA, 24 bp, Candida albicans
caaaaacggtgatgttcccagaat

SEQ ID NO: 4094 - DNA, 26 bp, Candida albicans
caatgaattggaaagaaaggaaggaa

SEQ ID NO: 4095 - DNA, 24 bp, Candida albicans
ccataattgtgtctcgcctttctg

SEQ ID NO: 4096 - DNA, 24 bp, Candida albicans
atggtctcgaaaatgcaacaggat

SEQ ID NO: 4097 - DNA, 24 bp, Candida albicans
tttatagttggacccgtgattccg

SEQ ID NO: 4098 - DNA, 24 bp, Candida albicans
tgccttggaagaaagtgaatcaaa

SEQ ID NO: 4099 - DNA, 27 bp, Candida albicans
tctctttcctagtatgtctctcggctg

SEQ ID NO: 4100 - DNA, 24 bp, Candida albicans
gctgacgaccaggatatggaagat

SEQ ID NO: 4101 - DNA, 24 bp, Candida albicans
agaatagaggaaagggtgaggggg

SEQ ID NO: 4102 - DNA, 24 bp, Candida albicans
atggccacacattcagaagaacaa

SEQ ID NO: 4103 - DNA, 24 bp, Candida albicans
taatctctgccatcttattccccc

SEQ ID NO: 4104 - DNA, 24 bp, Candida albicans
tgtttggccactttgttgtaatgg

SEQ ID NO: 4105 - DNA, 24 bp, Candida albicans
ggcaatccctgcaaagcttatcta

SEQ ID NO: 4106 - DNA, 24 bp, Candida albicans
ctgctggtattgctgctgttgact

SEQ ID NO: 4107 - DNA, 24 bp, Candida albicans
tttaaaccctggtacaccgctgat

SEQ ID NO: 4108 - DNA, 24 bp, Candida albicans
tttggggcaacagtggaattagat

SEQ ID NO: 4109 - DNA, 24 bp, Candida albicans
aaaattcacaatcttcagccccct

SEQ ID NO: 4110 - DNA, 24 bp, Candida albicans
agacctgcacatagtgtgacggaa

SEQ ID NO: 4111 - DNA, 24 bp, Candida albicans
atgatgatgatggtggtggatttg

SEQ ID NO: 4112 - DNA, 24 bp, Candida albicans
gtttgttaaccaccagtttgggga

SEQ ID NO: 4113 - DNA, 24 bp, Candida albicans
tactgttacgcaacgtcaagaggg

SEQ ID NO: 4114 - DNA, 24 bp, Candida albicans
gttgttcaaagcgggaagctattg

SEQ ID NO: 4115 - DNA, 24 bp, Candida albicans
ttatctttcaggcctggactcgac

SEQ ID NO: 4116 - DNA, 24 bp, Candida albicans
atcccctgtctccccagtattgat

SEQ ID NO: 4117 - DNA, 24 bp, Candida albicans
actggaagaaaccagaggatgcac

SEQ ID NO: 4118 - DNA, 24 bp, Candida albicans
gggaaagtgatatcctccccattt

SEQ ID NO: 4119 - DNA, 24 bp, Candida albicans
gtctgggggtaattctctatgggc

SEQ ID NO: 4120 - DNA, 24 bp, Candida albicans
gcaacttgatggatgatggaaatg

SEQ ID NO: 4121 - DNA, 24 bp, Candida albicans
ttcaccagcgacaaaatggtattg

SEQ ID NO: 4122 - DNA, 24 bp, Candida albicans
taccagtacctggaccagcaatga

SEQ ID NO: 4123 - DNA, 24 bp, Candida albicans
gctaatgccaatcctgtaccaagc

SEQ ID NO: 4124 - DNA, 24 bp, Candida albicans
gtacaaaaatagcgccatcccgta

SEQ ID NO: 4125 - DNA, 24 bp, Candida albicans
agtcctgggtccttctagccaatc

SEQ ID NO: 4126 - DNA, 24 bp, Candida albicans
agggattcaaattgggtcagtcag

SEQ ID NO: 4127 - DNA, 24 bp, Candida albicans
cgaatgaatgaatggcatcaaaaa

SEQ ID NO: 4128 - DNA, 24 bp, Candida albicans
tgatttttgaaatgcatcgaccac

SEQ ID NO: 4129 - DNA, 24 bp, Candida albicans
tgttgttgccttttcaattcttgc

SEQ ID NO: 4130 - DNA, 24 bp, Candida albicans
atctaactgaggtgcaagatgccc

SEQ ID NO: 4131 - DNA, 24 bp, Candida albicans
gcccgatttacataagccctttct

SEQ ID NO: 4132 - DNA, 32 bp, Candida albicans
tctgaaatttcttttatttacagtgattgtcg

SEQ ID NO: 4133 - DNA, 24 bp, Candida albicans
ttctcattggttctcttgcccaat

SEQ ID NO: 4134 - DNA, 24 bp, Candida albicans
agttgacgatgacacgttgacaca

SEQ ID NO: 4135 - DNA, 24 bp, Candida albicans
ggcgtgaccatcattagtcaacac

SEQ ID NO: 4136 - DNA, 24 bp, Candida albicans
caagggaggtgttttgatggtttc

SEQ ID NO: 4137 - DNA, 24 bp, Candida albicans
ccaccaagtcctaaaccttcatcg

SEQ ID NO: 4138 - DNA, 25 bp, Candida albicans
tcctttccttttcctctttccctct

SEQ ID NO: 4139 - DNA, 24 bp, Candida albicans
tgatttggaaaccaagattcacga

SEQ ID NO: 4140 - DNA, 20 bp, Candida albicans
gactttccccacccccaaaa

SEQ ID NO: 4141 - DNA, 20 bp, Candida albicans
attggttccggtattgccga

SEQ ID NO: 4142 - DNA, 27 bp, Candida albicans
aaggaatctaaacgattgattgacaca

SEQ ID NO: 4143 - DNA, 21 bp, Candida albicans
tcgctctcggaagaaggtgaa

SEQ ID NO: 4144 - DNA, 21 bp, Candida albicans
tcccttccgtccttcttgtcc

SEQ ID NO: 4145 - DNA, 29 bp, Candida albicans
cgacaattttgaaatatattgggaagaaa

SEQ ID NO: 4146 - DNA, 20 bp, Candida albicans
aaaagcaagcggcagtttcg

SEQ ID NO: 4147 - DNA, 20 bp, Candida albicans
ccgcctcctgtaaaacccgt

SEQ ID NO: 4148 - DNA, 20 bp, Candida albicans
ccaccaccaccaccaacaaa

SEQ ID NO: 4149 - DNA, 20 bp, Candida albicans
catccatgttgttttcgccg

SEQ ID NO: 4150 - DNA, 21 bp, Candida albicans
tgagaaggggcaaaagaggga

SEQ ID NO: 4151 - DNA, 23 bp, Candida albicans
tgctgctaacgctactttcacca

SEQ ID NO: 4152 - DNA, 20 bp, Candida albicans
ccgcattgaaatgtggcaaa

SEQ ID NO: 4153 - DNA, 21 bp, Candida albicans
ccaccaaaggaagaacagcga

SEQ ID NO: 4154 - DNA, 21 bp, Candida albicans
tcccgaatgtcgaggatttca

SEQ ID NO: 4155 - DNA, 20 bp, Candida albicans
gccaattctaaccgctccga

SEQ ID NO: 4156 - DNA, 20 bp, Candida albicans
actggcgacgcctcgtaaaa

SEQ ID NO: 4157 - DNA, 21 bp, Candida albicans
tgagcaaattgcacgaccaga

SEQ ID NO: 4158 - DNA, 20 bp, Candida albicans
caaactcagctcgatccccc

SEQ ID NO: 4159 - DNA, 20 bp, Candida albicans
atggaacaacaacgtggggg

SEQ ID NO: 4160 - DNA, 21 bp, Candida albicans
ttccaacgaaagcaacccaac

SEQ ID NO: 4161 - DNA, 25 bp, Candida albicans
tggaatcacttccttttaatgcaga

SEQ ID NO: 4162 - DNA, 20 bp, Candida albicans
ccaattgggggacaccaaga

SEQ ID NO: 4163 - DNA, 19 bp, Candida albicans
caccaaacgcattgcatgg

SEQ ID NO: 4164 - DNA, 22 bp, Candida albicans
tcaattctggcaagaggcattt

SEQ ID NO: 4165 - DNA, 24 bp, Candida albicans
gctaggtggaaagtgtcgtgttca

SEQ ID NO: 4166 - DNA, 20 bp, Candida albicans
gccaccagcagcaccatatt

SEQ ID NO: 4167 - DNA, 22 bp, Candida albicans
tcgctttaaacaaaaccgcaca

SEQ ID NO: 4168 - DNA, 22 bp, Candida albicans
tggccttgtttgttctgctttg

SEQ ID NO: 4169 - DNA, 22 bp, Candida albicans
tcgtcttgcttgttgtcccaaa

SEQ ID NO: 4170 - DNA, 23 bp, Candida albicans
aactcgtttaatcccgtgttgct

SEQ ID NO: 4171 - DNA, 20 bp, Candida albicans
gggaagaggggacgtgaggt

SEQ ID NO: 4172 - DNA, 20 bp, Candida albicans
tctggctcggttttcccgta

SEQ ID NO: 4173 - DNA, 25 bp, Candida albicans
agtggcgaagagagattaactggag

SEQ ID NO: 4174 - DNA, 25 bp, Candida albicans
cgaacaagaagaagaaccattgcat

SEQ ID NO: 4175 - DNA, 20 bp, Candida albicans
atgtggcacacggctgaaaa

SEQ ID NO: 4176 - DNA, 20 bp, Candida albicans
tgttgggaggatgggagctg

SEQ ID NO: 4177 - DNA, 25 bp, Candida albicans
tgaaaaatttctcttcttttggggg

SEQ ID NO: 4178 - DNA, 22 bp, Candida albicans
ttctgaatgggacgaacaagga

SEQ ID NO: 4179 - DNA, 20 bp, Candida albicans
gattcaaaagcgccactcgg

SEQ ID NO: 4180 - DNA, 20 bp, Candida albicans
tgaccaggccagagatgctg

SEQ ID NO: 4181 - DNA, 20 bp, Candida albicans
agtttgcatgggcacgacct

SEQ ID NO: 4182 - DNA, 20 bp, Candida albicans
gatgggtcgtgtgctagggc

SEQ ID NO: 4183 - DNA, 25 bp, Candida albicans
tggaggtccaatgtctcctagattg

SEQ ID NO: 4184 - DNA, 20 bp, Candida albicans
aattctccctcacgccgaaa

SEQ ID NO: 4185 - DNA, 20 bp, Candida albicans
tgcctcgagtgctaatgcca

SEQ ID NO: 4186 - DNA, 22 bp, Candida albicans
gcctaggtcaattgtggatggc

SEQ ID NO: 4187 - DNA, 25 bp, Candida albicans
tggcgtgtttaagaataataaggcg

SEQ ID NO: 4188 - DNA, 21 bp, Candida albicans
tgcacacatgggagtgtacca

SEQ ID NO: 4189 - DNA, 20 bp, Candida albicans
aagccttggttggggagagg

SEQ ID NO: 4190 - DNA, 20 bp, Candida albicans
gctcgtctgcgctgtaatgc

SEQ ID NO: 4191 - DNA, 23 bp, Candida albicans
caccaacgcgtcataatcttcaa

SEQ ID NO: 4192 - DNA, 20 bp, Candida albicans
tcatttgccgttgcagcagt

SEQ ID NO: 4193 - DNA, 20 bp, Candida albicans
ccctctcgggctggacacta

SEQ ID NO: 4194 - DNA, 25 bp, Candida albicans
tgagtgtaaaatactggcgtccaca

SEQ ID NO: 4195 - DNA, 24 bp, Candida albicans
actgattgccaaccaacagtcaaa

SEQ ID NO: 4196 - DNA, 24 bp, Candida albicans
ccaaaatcgaacagcaaagcctac

SEQ ID NO: 4197 - DNA, 22 bp, Candida albicans
aaaaacgtgccaacaacgtgat

SEQ ID NO: 4198 - DNA, 24 bp, Candida albicans
ttgacttggacgtagagatcgtgc

SEQ ID NO: 4199 - DNA, 24 bp, Candida albicans
tcgaaatatcatgaggctttggtg

SEQ ID NO: 4200 - DNA, 24 bp, Candida albicans
ccaccattctcactcgaaggttct

SEQ ID NO: 4201 - DNA, 24 bp, Candida albicans
gccgaggattcaaatagtttgtgc

SEQ ID NO: 4202 - DNA, 24 bp, Candida albicans
ccacacacaccttaaatcacccaa

SEQ ID NO: 4203 - DNA, 24 bp, Candida albicans
atcacgacattgcctagggatcaa

SEQ ID NO: 4204 - DNA, 24 bp, Candida albicans
gacaattttagggcgttggatttt

SEQ ID NO: 4205 - DNA, 24 bp, Candida albicans
tcgctccatcaaagacacaagaaa

SEQ ID NO: 4206 - DNA, 24 bp, Candida albicans
aatcaaagcctccttactcgtccc

SEQ ID NO: 4207 - DNA, 24 bp, Candida albicans
cacagtcacgtgccaaaaaggata

SEQ ID NO: 4208 - DNA, 24 bp, Candida albicans
gtgactcgttcctgatctccacct

SEQ ID NO: 4209 - DNA, 24 bp, Candida albicans
actttacacttctcgccgcagttc

SEQ ID NO: 4210 - DNA, 24 bp, Candida albicans
atgaaggtgctcgtgaaattctcc

SEQ ID NO: 4211 - DNA, 24 bp, Candida albicans
atccgttgtggtcattggcttagt

SEQ ID NO: 4212 - DNA, 24 bp, Candida albicans
tcagattctcaaccccacacacat

SEQ ID NO: 4213 - DNA, 24 bp, Candida albicans
agccaattagaaaatcgcagttcg

SEQ ID NO: 4214 - DNA, 24 bp, Candida albicans
cgtgggaaaaattcacaagaaaca

SEQ ID NO: 4215 - DNA, 25 bp, Candida albicans
cctcatgaagaagctgttgcattgt

SEQ ID NO: 4216 - DNA, 24 bp, Candida albicans
tggtgtcaaagtctcggcctttat

SEQ ID NO: 4217 - DNA, 24 bp, Candida albicans
ccgacatcaacaattacgttgaga

SEQ ID NO: 4218 - DNA, 24 bp, Candida albicans
atcacaactcttgaaagaaggcca

SEQ ID NO: 4219 - DNA, 24 bp, Candida albicans
taaaagtcctcgaccgccctattt

SEQ ID NO: 4220 - DNA, 27 bp, Candida albicans
ccaaaacaataaaagcaacttcacaca

SEQ ID NO: 4221 - DNA, 27 bp, Candida albicans
tgaagatgagggagatgaaatacctga

SEQ ID NO: 4222 - DNA, 21 bp, Candida albicans
ggataaaaaggaatcggttgc

SEQ ID NO: 4223 - DNA, 23 bp, Candida albicans
acaacaaaccaaatggaaagatg

SEQ ID NO: 4224 - DNA, 28 bp, Candida albicans
ttaagagagaaatgttttctcaaaacaa

SEQ ID NO: 4225 - DNA, 26 bp, Candida albicans
aaaatttctctgtcagtctgtcagag

SEQ ID NO: 4226 - DNA, 25 bp, Candida albicans
aattgaaaatacagatggaagcaac

SEQ ID NO: 4227 - DNA, 24 bp, Candida albicans
tttcggataaattagccttgtcat

SEQ ID NO: 4228 - DNA, 18 bp, Candida albicans
cgtgcatgactggcaaaa

SEQ ID NO: 4229 - DNA, 27 bp, Candida albicans
tttgtaaagagatttaagtgtgatcca

SEQ ID NO: 4230 - DNA, 23 bp, Candida albicans
aaccacttcacacgacaaaagat

SEQ ID NO: 4231 - DNA, 21 bp, Candida albicans
agcaccgttttgatgttgatc

SEQ ID NO: 4232 - DNA, 24 bp, Candida albicans
ttagctccatatacctccaaggac

SEQ ID NO: 4233 - DNA, 27 bp, Candida albicans
cctttcctttcttttaactttctaacc

SEQ ID NO: 4234 - DNA, 32 bp, Candida albicans
aagatttaagctagatataagaagattcaacc

SEQ ID NO: 4235 - DNA, 24 bp, Candida albicans
caggcaattacataaacctttcct

SEQ ID NO: 4236 - DNA, 22 bp, Candida albicans
gagaggccaaaagggaataaag

SEQ ID NO: 4237 - DNA, 27 bp, Candida albicans
ccaccacctaattaaaatagtttgatg

SEQ ID NO: 4238 - DNA, 25 bp, Candida albicans
atttattgtagatacgcacacgaca

SEQ ID NO: 4239 - DNA, 18 bp, Candida albicans
gtcagccaaagcgaagga

SEQ ID NO: 4240 - DNA, 25 bp, Candida albicans
tgctcaaaacctattatgtggattt

SEQ ID NO: 4241 - DNA, 23 bp, Candida albicans
tctttttcatttttggtcgattg

SEQ ID NO: 4242 - DNA, 23 bp, Candida albicans
aaggaatttgttttttacccctg

SEQ ID NO: 4243 - DNA, 30 bp, Candida albicans
aacaacgaaaaagaaaattaacttttaatt

SEQ ID NO: 4244 - DNA, 27 bp, Candida albicans
tccttttaagtttcttttcaattttca

SEQ ID NO: 4245 - DNA, 25 bp, Candida albicans
tacaattaactaaatcatgtggcca

SEQ ID NO: 4246 - DNA, 32 bp, Candida albicans
tcttgtaccgtaaatagttttattttaagttg

SEQ ID NO: 4247 - DNA, 25 bp, Candida albicans
tgaagttttagaagatgctgaatca

SEQ ID NO: 4248 - DNA, 26 bp, Candida albicans
ttgtttgggaataagttacaacaaag

SEQ ID NO: 4249 - DNA, 25 bp, Candida albicans
gtttgtaatctctggaaagttacgc

SEQ ID NO: 4250 - DNA, 27 bp, Candida albicans
tgaattaattgaaggtaagcttgattt

SEQ ID NO: 4251 - DNA, 30 bp, Candida albicans
tcgacaaattcttaaactataaatacaacc

SEQ ID NO: 4252 - DNA, 22 bp, Candida albicans
aagccaaattgtagaatgcaca

SEQ ID NO: 4253 - DNA, 23 bp, Candida albicans
ttttgtcaatgtgtgagaaaacg

SEQ ID NO: 4254 - DNA, 28 bp, Candida albicans
ttttgtacttatcgtggatttaatcatt

SEQ ID NO: 4255 - DNA, 24 bp, Candida albicans
tcaaagaaaaattggtaccgagtt

SEQ ID NO: 4256 - DNA, 29 bp, Candida albicans
ttatcgactcgttatttatattgttttgt

SEQ ID NO: 4257 - DNA, 29 bp, Candida albicans
aaagatgttggtttacctaatagtagtca

SEQ ID NO: 4258 - DNA, 25 bp, Candida albicans
agtatcttttctcttggagtcgtca

SEQ ID NO: 4259 - DNA, 26 bp, Candida albicans
tgatttgatttcttctgtttattgct

SEQ ID NO: 4260 - DNA, 26 bp, Candida albicans
caataagtgtggcaattgtagagtct

SEQ ID NO: 4261 - DNA, 26 bp, Candida albicans
aatgtccttaaagtaaagtaatggcc

SEQ ID NO: 4262 - DNA, 24 bp, Candida albicans
atacatagagcagcagttgtgctt

SEQ ID NO: 4263 - DNA, 26 bp, Candida albicans
ttcaattctccaatactttgtttgtt

SEQ ID NO: 4264 - DNA, 23 bp, Candida albicans
actatgatcccaccatctcaaga

SEQ ID NO: 4265 - DNA, 24 bp, Candida albicans
gggttgagatcagtcatttgtttt

SEQ ID NO: 4266 - DNA, 28 bp, Candida albicans
ggttaatttgtaatagttgattgtcgtc

SEQ ID NO: 4267 - DNA, 23 bp, Candida albicans
ccgtcaaatttagcacgactaaa

SEQ ID NO: 4268 - DNA, 22 bp, Candida albicans
gtttaaaagtgtggaaatgggg

SEQ ID NO: 4269 - DNA, 29 bp, Candida albicans
tgataatgcaaattagtattttatgctgt

SEQ ID NO: 4270 - DNA, 22 bp, Candida albicans
ttgttgatttgtcggtagatgc

SEQ ID NO: 4271 - DNA, 28 bp, Candida albicans
cagatgttgtgtgtatattgtgtattga

SEQ ID NO: 4272 - DNA, 22 bp, Candida albicans
aaatagaggacacccgtcaatg

SEQ ID NO: 4273 - DNA, 24 bp, Candida albicans
cttcttgcaagctgttgatactgt

SEQ ID NO: 4274 - DNA, 20 bp, Candida albicans
atgaacacgccctacacaca

SEQ ID NO: 4275 - DNA, 24 bp, Candida albicans
acaaacagttgttgaccaaatttg

SEQ ID NO: 4276 - DNA, 24 bp, Candida albicans
tgtggtttagagtgcacattaaca

SEQ ID NO: 4277 - DNA, 25 bp, Candida albicans
agtaaccgtcacgaaatgttaatgt

SEQ ID NO: 4278 - DNA, 27 bp, Candida albicans
acacacattcagctaaaaatttttctt

SEQ ID NO: 4279 - DNA, 27 bp, Candida albicans
cggatagatattaattgattgtgatca

SEQ ID NO: 4280 - DNA, 24 bp, Candida albicans
aataatcatgtataaagcgcccat

SEQ ID NO: 4281 - DNA, 27 bp, Candida albicans
tgtttgatttctttattgtccttttct

SEQ ID NO: 4282 - DNA, 26 bp, Candida albicans
agagaccgagtttcaatagacacttt

SEQ ID NO: 4283 - DNA, 25 bp, Candida albicans
tcttgaagtagaagccagaatatgg

SEQ ID NO: 4284 - DNA, 23 bp, Candida albicans
cgcagaagcaaaatattctcaat

SEQ ID NO: 4285 - DNA, 23 bp, Candida albicans
tcccatccgtttttaaaactttt

SEQ ID NO: 4286 - DNA, 25 bp, Candida albicans
gttgtcatatcacacaaaattacgg

SEQ ID NO: 4287 - DNA, 19 bp, Candida albicans
atgcgataagaacggtccc

SEQ ID NO: 4288 - DNA, 27 bp, Candida albicans
caaatcttgactgaatatttcaacaag

SEQ ID NO: 4289 - DNA, 23 bp, Candida albicans
agagggtgctatgttgagatgaa

SEQ ID NO: 4290 - DNA, 30 bp, Candida albicans
gcagctaatcaagactattagttattttcc

SEQ ID NO: 4291 - DNA, 24 bp, Candida albicans
gatggaaatgtggattatgttgaa

SEQ ID NO: 4292 - DNA, 19 bp, Candida albicans
atcaattgaatttccccgc

SEQ ID NO: 4293 - DNA, 26 bp, Candida albicans
tgttgttgatatcttctgtagccatt

SEQ ID NO: 4294 - DNA, 24 bp, Candida albicans
ctcactgattatctgattgatgcc

SEQ ID NO: 4295 - DNA, 26 bp, Candida albicans
aagaagtcattgatgaatcattacca

SEQ ID NO: 4296 - DNA, 25 bp, Candida albicans
ccttcaggtgattttcttagacaaa

SEQ ID NO: 4297 - DNA, 21 bp, Candida albicans
ttgtcaattggaatcggaaaa

SEQ ID NO: 4298 - DNA, 21 bp, Candida albicans
tgttagcatgctttgtcgcta

SEQ ID NO: 4299 - DNA, 19 bp, Candida albicans
cacgccaacagacgaattt

SEQ ID NO: 4300 - DNA, 28 bp, Candida albicans
gatgataaagttgatttctaatcttgca

SEQ ID NO: 4301 - DNA, 29 bp, Candida albicans
aaataagatagagtgatacattgtcaacg

SEQ ID NO: 4302 - DNA, 25 bp, Candida albicans
agatccaccagtccattcataataa

SEQ ID NO: 4303 - DNA, 33 bp, Candida albicans
tgttgaagttagttacgtattactagattagtg

SEQ ID NO: 4304 - DNA, 32 bp, Candida albicans
agaaatggaatatgaattactcttactattga

SEQ ID NO: 4305 - DNA, 28 bp, Candida albicans
tgagtacttttaagctttaacatttggt

SEQ ID NO: 4306 - DNA, 23 bp, Candida albicans
agcttaattgatttgacccatca

SEQ ID NO: 4307 - DNA, 21 bp, Candida albicans
aacgtgatcaaaatgccactc

SEQ ID NO: 4308 - DNA, 24 bp, Candida albicans
ttttaaatcctgccattatggaat

SEQ ID NO: 4309 - DNA, 24 bp, Candida albicans
agaattgaactgtctatccatgca

SEQ ID NO: 4310 - DNA, 31 bp, Candida albicans
accattgatattggtattattaggtttaact

SEQ ID NO: 4311-5000 - skipped (690 entries)

SEQ ID NO: 5001 - DNA, 21 bp, Candida albicans
cccagcctccggtaattctca

SEQ ID NO: 5002 - DNA, 21 bp, Candida albicans
ccttttgttgagccggggata

SEQ ID NO: 5003 - DNA, 20 bp, Candida albicans
cggttggagcggtgatttgt

SEQ ID NO: 5004 - DNA, 21 bp, Candida albicans
cccagcagccactactcttgg

SEQ ID NO: 5005 - DNA, 23 bp, Candida albicans
tgtggaggttggatctgtgtttg

SEQ ID NO: 5006 - DNA, 20 bp, Candida albicans
cggagcattgacgacccatt

SEQ ID NO: 5007 - DNA, 20 bp, Candida albicans
attgcgttatggctggtggg

SEQ ID NO: 5008 - DNA, 24 bp, Candida albicans
cacgatttaacgttggatgtcctg

SEQ ID NO: 5009 - DNA, 27 bp, Candida albicans
tgaaataaactgaatcccaaacaatca

SEQ ID NO: 5010 - DNA, 24 bp, Candida albicans
ttgtgttggccaaagagtcaccta

SEQ ID NO: 5011 - DNA, 24 bp, Candida albicans
ttagaattgttggtggcattggtg

SEQ ID NO: 5012 - DNA, 24 bp, Candida albicans
tcaaatcggcattagggatttcat

SEQ ID NO: 5013 - DNA, 24 bp, Candida albicans
attcacgacaagcagatgaagcag

SEQ ID NO: 5014 - DNA, 21 bp, Candida albicans
ggtgttggggtacacgctagg

SEQ ID NO: 5015 - DNA, 25 bp, Candida albicans
gaatgctggatctttagaggcgttt

SEQ ID NO: 5016 - DNA, 20 bp, Candida albicans
gccatggacccgtaggaaca

SEQ ID NO: 5017 - DNA, 20 bp, Candida albicans
tggcctaacatcgcatctcg

SEQ ID NO: 5018 - DNA, 20 bp, Candida albicans
cctgcattgccaacctttcc

SEQ ID NO: 5019 - DNA, 20 bp, Candida albicans
ttgctgttcccaacaaggca

SEQ ID NO: 5020 - DNA, 22 bp, Candida albicans
tggactcgttctcctgtgttgg

SEQ ID NO: 5021 - DNA, 20 bp, Candida albicans
aggaccccaatcccatccat

SEQ ID NO: 5022 - DNA, 20 bp, Candida albicans
cgaccagcagcagctttcaa

SEQ ID NO: 5023 - DNA, 20 bp, Candida albicans
gcccattcggaactgctttg

SEQ ID NO: 5024 - DNA, 20 bp, Candida albicans
gaatcttggccaggtggtgg

SEQ ID NO: 5025 - DNA, 22 bp, Candida albicans
ggagcagcatcacgtaatggaa

SEQ ID NO: 5026 - DNA, 20 bp, Candida albicans
atcatgggccgaaatacccg

SEQ ID NO: 5027 - DNA, 21 bp, Candida albicans
cccaataaactgctgatggcg

SEQ ID NO: 5028 - DNA, 21 bp, Candida albicans
tcattgttggagatctggggg

SEQ ID NO: 5029 - DNA, 20 bp, Candida albicans
ggttctggtcccgattccaa

SEQ ID NO: 5030 - DNA, 20 bp, Candida albicans
ttcgccatcttcatctgcca

SEQ ID NO: 5031 - DNA, 22 bp, Candida albicans
gcaaaggtcgcaaaatatgcag

SEQ ID NO: 5032 - DNA, 20 bp, Candida albicans
tgcggcacgatttcatcaac

SEQ ID NO: 5033 - DNA, 21 bp, Candida albicans
cctttccctgctgctcctttg

SEQ ID NO: 5034 - DNA, 20 bp, Candida albicans
caagaccaggctttgtgggg

SEQ ID NO: 5035 - DNA, 20 bp, Candida albicans
ccgcgttttctgggtcttgt

SEQ ID NO: 5036 - DNA, 20 bp, Candida albicans
atggggatgtttttggcagc

SEQ ID NO: 5037 - DNA, 20 bp, Candida albicans
ccacaccaaggggcgtaaaa

SEQ ID NO: 5038 - DNA, 20 bp, Candida albicans
caagcggaaccaaggcaaac

SEQ ID NO: 5039 - DNA, 20 bp, Candida albicans
attcaaccagggcgattcca

SEQ ID NO: 5040 - DNA, 20 bp, Candida albicans
aggcccattagcacccacac

SEQ ID NO: 5041 - DNA, 22 bp, Candida albicans
tggtctccttaaccctttggga

SEQ ID NO: 5042 - DNA, 24 bp, Candida albicans
tggtggtgattgtttagctgatga

SEQ ID NO: 5043 - DNA, 20 bp, Candida albicans
cgccaaagtggccaacaaat

SEQ ID NO: 5044 - DNA, 20 bp, Candida albicans
tgcttacgcacgtcggtttg

SEQ ID NO: 5045 - DNA, 25 bp, Candida albicans
tcagctaaattttgttcgtcaggga

SEQ ID NO: 5046 - DNA, 23 bp, Candida albicans
aaaatcatggaaacaaggcacga

SEQ ID NO: 5047 - DNA, 22 bp, Candida albicans
ttgaaagcttggtttggcttga

SEQ ID NO: 5048 - DNA, 20 bp, Candida albicans
cggcagtgggttcagcttct

SEQ ID NO: 5049 - DNA, 20 bp, Candida albicans
catcagcgggtgacgttttg

SEQ ID NO: 5050 - DNA, 20 bp, Candida albicans
aactcccctgtgtgcgcttc

SEQ ID NO: 5051 - DNA, 20 bp, Candida albicans
cgaccctgtgcaatcaccag

SEQ ID NO: 5052 - DNA, 20 bp, Candida albicans
tcagcgggatcttcaaaccc

SEQ ID NO: 5053 - DNA, 20 bp, Candida albicans
tggcaactccattggctgaa

SEQ ID NO: 5054 - DNA, 20 bp, Candida albicans
cgtactcgccatctgctgga

SEQ ID NO: 5055 - DNA, 20 bp, Candida albicans
atccccaccagcaggaaaca

SEQ ID NO: 5056 - DNA, 20 bp, Candida albicans
acagtaggtgccggtggagg

SEQ ID NO: 5057 - DNA, 21 bp, Candida albicans
cccgaatccgtacctacgaca

SEQ ID NO: 5058 - DNA, 23 bp, Candida albicans
tggctcgataaccagtaccaaca

SEQ ID NO: 5059 - DNA, 22 bp, Candida albicans
ttgtgaacgatccatcaacgtg

SEQ ID NO: 5060 - DNA, 20 bp, Candida albicans
caattgctgctttggttgcg

SEQ ID NO: 5061 - DNA, 22 bp, Candida albicans
ccaagccagagatgctaatccc

SEQ ID NO: 5062 - DNA, 20 bp, Candida albicans
ttttgacattggcaccagca

SEQ ID NO: 5063 - DNA, 24 bp, Candida albicans
tttccaacggcaactactgatgaa

SEQ ID NO: 5064 - DNA, 24 bp, Candida albicans
ttttgatttcttttcaccgtggct

SEQ ID NO: 5065 - DNA, 24 bp, Candida albicans
tccatcttttgattcccgacagtt

SEQ ID NO: 5066 - DNA, 24 bp, Candida albicans
ctttattgatgccggtccttgttc

SEQ ID NO: 5067 - DNA, 24 bp, Candida albicans
ggaaaattgtcgatgagctggaag

SEQ ID NO: 5068 - DNA, 24 bp, Candida albicans
gagctcctatctgagccgtttctg

SEQ ID NO: 5069 - DNA, 24 bp, Candida albicans
atggcttctctaaccgaagggaaa

SEQ ID NO: 5070 - DNA, 24 bp, Candida albicans
ccagcacctctttcagcacctaat

SEQ ID NO: 5071 - DNA, 24 bp, Candida albicans
tgatgatgatgatgatgatggtgg

SEQ ID NO: 5072 - DNA, 24 bp, Candida albicans
atagatggtgcacccaaaacatcc

SEQ ID NO: 5073 - DNA, 24 bp, Candida albicans
aggatcattcggatcatcaacaca

SEQ ID NO: 5074 - DNA, 24 bp, Candida albicans
aacaagtcgattggtttggtgctt

SEQ ID NO: 5075 - DNA, 24 bp, Candida albicans
tcaaatcttcccttgtggtgtcaa

SEQ ID NO: 5076 - DNA, 24 bp, Candida albicans
aagcttgggctctaatcattgctg

SEQ ID NO: 5077 - DNA, 24 bp, Candida albicans
ctaattgcacctgcactcaatgct

SEQ ID NO: 5078 - DNA, 24 bp, Candida albicans
tcggggtcgtaaatatcttcatgc

SEQ ID NO: 5079 - DNA, 24 bp, Candida albicans
cataaaccaccggttctatcccaa

SEQ ID NO: 5080 - DNA, 24 bp, Candida albicans
cttccatttcatattgtggcggtt

SEQ ID NO: 5081 - DNA, 24 bp, Candida albicans
gccaattgttgttgtggttgttgt

SEQ ID NO: 5082 - DNA, 24 bp, Candida albicans
gcagcagcagcattaccactaaga

SEQ ID NO: 5083 - DNA, 24 bp, Candida albicans
gcttttcttttcgacgctggagta

SEQ ID NO: 5084 - DNA, 24 bp, Candida albicans
ttttcatcagcgaaagcaatcaaa

SEQ ID NO: 5085 - DNA, 24 bp, Candida albicans
tgctgtgttgaacaggaacgattt

SEQ ID NO: 5086 - DNA, 24 bp, Candida albicans
tcttcttttggaaatcgctcttcg

SEQ ID NO: 5087 - DNA, 24 bp, Candida albicans
gaaaccatcaacaacagcgtcatc

SEQ ID NO: 5088 - DNA, 24 bp, Candida albicans
tctggatgggttttcttgtcgatt

SEQ ID NO: 5089 - DNA, 24 bp, Candida albicans
gttgtagtcggtgtgtggatctgg

SEQ ID NO: 5090 - DNA, 24 bp, Candida albicans
tttggctgcatttctagtgtccaa

SEQ ID NO: 5091 - DNA, 24 bp, Candida albicans
atttgttgtttgatggtggtggtg

SEQ ID NO: 5092 - DNA, 24 bp, Candida albicans
tgattttggcagttgtttccaatg

SEQ ID NO: 5093 - DNA, 24 bp, Candida albicans
cacgaaggattttgatccccatta

SEQ ID NO: 5094 - DNA, 25 bp, Candida albicans
caaattttgtaatcgttcccgttca

SEQ ID NO: 5095 - DNA, 25 bp, Candida albicans
tgcaacctactaacttgggtttcaa

SEQ ID NO: 5096 - DNA, 24 bp, Candida albicans
tctgtgtttgtgtagaatgcccgt

SEQ ID NO: 5097 - DNA, 24 bp, Candida albicans
gtcggtgatttctttccaagcatc

SEQ ID NO: 5098 - DNA, 24 bp, Candida albicans
catggcttgatcaacatcattggt

SEQ ID NO: 5099 - DNA, 24 bp, Candida albicans
atggatcgtttagatagcccccag

SEQ ID NO: 5100 - DNA, 24 bp, Candida albicans
ttttgaaaatggccaatcgaagag

SEQ ID NO: 5101 - DNA, 25 bp, Candida albicans
tccaatgttattcccttcttcctcc

SEQ ID NO: 5102 - DNA, 24 bp, Candida albicans
tcaagtttcctatctccaatgcgg

SEQ ID NO: 5103 - DNA, 24 bp, Candida albicans
aaccatttctggaccatccatttg

SEQ ID NO: 5104 - DNA, 24 bp, Candida albicans
ataatgggaccgatgttggatgag

SEQ ID NO: 5105 - DNA, 23 bp, Candida albicans
ttgatcaatgctgcttgagcttc

SEQ ID NO: 5106 - DNA, 24 bp, Candida albicans
acagcaacacgattggtttgagaa

SEQ ID NO: 5107 - DNA, 24 bp, Candida albicans
ccaatttataaggcggtggttgaa

SEQ ID NO: 5108 - DNA, 24 bp, Candida albicans
cgtcgtagtcggatttcgtttagc

SEQ ID NO: 5109 - DNA, 24 bp, Candida albicans
ccatcagcagcataagcacaattc

SEQ ID NO: 5110 - DNA, 24 bp, Candida albicans
gtgagttgcttttcttgtcagcga

SEQ ID NO: 5111 - DNA, 24 bp, Candida albicans
aagctttcgcctttggtggattat

SEQ ID NO: 5112 - DNA, 24 bp, Candida albicans
ccaaaaggtctagctcgtcaggaa

SEQ ID NO: 5113 - DNA, 24 bp, Candida albicans
tgatcaaagtttgtgatggcgtct

SEQ ID NO: 5114 - DNA, 24 bp, Candida albicans
tcccattttggtaggatttgttgg

SEQ ID NO: 5115 - DNA, 24 bp, Candida albicans
ttcaccaatagcttgcatcaatgg

SEQ ID NO: 5116 - DNA, 24 bp, Candida albicans
cagcttcttttctgggtcagcatt

SEQ ID NO: 5117 - DNA, 24 bp, Candida albicans
ataggcacttcgtcttcatcgtcc

SEQ ID NO: 5118 - DNA, 24 bp, Candida albicans
caaacggattaagaacttcgtgcc

SEQ ID NO: 5119 - DNA, 24 bp, Candida albicans
gtgcttaacctttcaccgcgatac

SEQ ID NO: 5120 - DNA, 24 bp, Candida albicans
ccaccttcctcatctatggcaaac

SEQ ID NO: 5121 - DNA, 24 bp, Candida albicans
ggttccccattggctttaaatgtt

SEQ ID NO: 5122 - DNA, 24 bp, Candida albicans
tccagaaaacccaactcgatcaat

SEQ ID NO: 5123 - DNA, 24 bp, Candida albicans
tactgtcagggttgatgagcgaaa

SEQ ID NO: 5124 - DNA, 24 bp, Candida albicans
atctttggtgtcttccactggagc

SEQ ID NO: 5125 - DNA, 24 bp, Candida albicans
ctggacctaatccaaattgaaccg

SEQ ID NO: 5126 - DNA, 24 bp, Candida albicans
gatggtttggttttcgatgcattt

SEQ ID NO: 5127 - DNA, 24 bp, Candida albicans
ttggaccagaaacaaccaagtcaa

SEQ ID NO: 5128 - DNA, 24 bp, Candida albicans
actgcttgtcacatcagcattggt

SEQ ID NO: 5129 - DNA, 24 bp, Candida albicans
tttgacaatggcatcacgatctct

SEQ ID NO: 5130 - DNA, 24 bp, Candida albicans
atcccatttgtttcccagttcctt

SEQ ID NO: 5131 - DNA, 24 bp, Candida albicans
ccaagggataaatcaacccaatca

SEQ ID NO: 5132 - DNA, 24 bp, Candida albicans
tgcagagccagtagatggatgaac

SEQ ID NO: 5133 - DNA, 24 bp, Candida albicans
ggcatcaacttttgccttttgttc

SEQ ID NO: 5134 - DNA, 24 bp, Candida albicans
taaaccctccaaacacaccaaacc

SEQ ID NO: 5135 - DNA, 24 bp, Candida albicans
ttgcccgtatttttcaagcaaatc

SEQ ID NO: 5136 - DNA, 24 bp, Candida albicans
gggacgatattcctcaaatgggtt

SEQ ID NO: 5137 - DNA, 24 bp, Candida albicans
ggggttggtggtttctgtagtcag

SEQ ID NO: 5138 - DNA, 24 bp, Candida albicans
tgatgtattgatccaattggcagg

SEQ ID NO: 5139 - DNA, 24 bp, Candida albicans
ttggtcactgctaacatttgggtg

SEQ ID NO: 5140 - DNA, 26 bp, Candida albicans
ggcaaaccagaactcagataatttgg

SEQ ID NO: 5141 - DNA, 24 bp, Candida albicans
aatttcttctccagttgcgacgac

SEQ ID NO: 5142 - DNA, 24 bp, Candida albicans
aaagatgactggaccttcacgagg

SEQ ID NO: 5143 - DNA, 24 bp, Candida albicans
agcgtggctggaattgtaatgttt

SEQ ID NO: 5144 - DNA, 24 bp, Candida albicans
ataggcctcatccgacactaacga

SEQ ID NO: 5145 - DNA, 20 bp, Candida albicans
ttgggagataatgccgtacc

SEQ ID NO: 5146 - DNA, 24 bp, Candida albicans
aatggctttcacttcacggtttgt

SEQ ID NO: 5147 - DNA, 24 bp, Candida albicans
aaatcaatgctaccgattccgcta

SEQ ID NO: 5148 - DNA, 24 bp, Candida albicans
tgaattctctcaccaccagcactc

SEQ ID NO: 5149 - DNA, 24 bp, Candida albicans
tatgcatgccaatgttgtgatgag

SEQ ID NO: 5150 - DNA, 27 bp, Candida albicans
agtgatgtaccttcactttcaccttca

SEQ ID NO: 5151 - DNA, 24 bp, Candida albicans
ataggcaccattgtattgggcaac

SEQ ID NO: 5152 - DNA, 24 bp, Candida albicans
tcgactgatccttgacaagtcctg

SEQ ID NO: 5153 - DNA, 27 bp, Candida albicans
tcctttaatatttggactttcttccga

SEQ ID NO: 5154 - DNA, 24 bp, Candida albicans
tgttgctttggtggagctttagaa

SEQ ID NO: 5155 - DNA, 24 bp, Candida albicans
attcccacattcaacaactcgaca

SEQ ID NO: 5156 - DNA, 24 bp, Candida albicans
agtctccctatacgggccatcaat

SEQ ID NO: 5157 - DNA, 24 bp, Candida albicans
aatcactggttcagggtgctcttc

SEQ ID NO: 5158 - DNA, 24 bp, Candida albicans
tctcggattgctgagaatctcctt

SEQ ID NO: 5159 - DNA, 24 bp, Candida albicans
gatatccatcggaaatcaaggcaa

SEQ ID NO: 5160 - DNA, 21 bp, Candida albicans
ttccatttcaatggggacagg

SEQ ID NO: 5161 - DNA, 24 bp, Candida albicans
gttgcataatcgcatcatgtctcc

SEQ ID NO: 5162 - DNA, 24 bp, Candida albicans
accaccactgaatcttccacctct

SEQ ID NO: 5163 - DNA, 24 bp, Candida albicans
gaattgaaggcgctaggtgctcta

SEQ ID NO: 5164 - DNA, 24 bp, Candida albicans
atcttcatcggaagtgagaccgac

SEQ ID NO: 5165 - DNA, 24 bp, Candida albicans
ccacctggaccatcacgataacta

SEQ ID NO: 5166 - DNA, 24 bp, Candida albicans
ttcgtcgtcattgtgtttggagat

SEQ ID NO: 5167 - DNA, 24 bp, Candida albicans
ctttcaatgggttggcgatatcat

SEQ ID NO: 5168 - DNA, 24 bp, Candida albicans
ttgactgggcttggtgatttgtta

SEQ ID NO: 5169 - DNA, 24 bp, Candida albicans
ggtaatgacacaacatcgacctgc

SEQ ID NO: 5170 - DNA, 24 bp, Candida albicans
cggtggtttcttcttgatctttcg

SEQ ID NO: 5171 - DNA, 24 bp, Candida albicans
acttcgatgaatgggattgctgtt

SEQ ID NO: 5172 - DNA, 24 bp, Candida albicans
taatgcttcctttgggtcaccttg

SEQ ID NO: 5173 - DNA, 25 bp, Candida albicans
gcaggaattgaatgagttgatcctc

SEQ ID NO: 5174 - DNA, 26 bp, Candida albicans
ccatcataaggaaatttggtattggg

SEQ ID NO: 5175 - DNA, 24 bp, Candida albicans
cacctgtggaatctcccattctct

SEQ ID NO: 5176 - DNA, 24 bp, Candida albicans
gcttcattacgaacatcattgcca

SEQ ID NO: 5177 - DNA, 23 bp, Candida albicans
tgggattttccatttgcatcttc

SEQ ID NO: 5178 - DNA, 25 bp, Candida albicans
cctctgaatgatttctcaacatccc

SEQ ID NO: 5179 - DNA, 24 bp, Candida albicans
cctccaaatggtgaattgttggtt

SEQ ID NO: 5180 - DNA, 24 bp, Candida albicans
gttaaatcgcccaatgacgatgat

SEQ ID NO: 5181 - DNA, 24 bp, Candida albicans
ccttgcaggactagcaatagtggg

SEQ ID NO: 5182 - DNA, 24 bp, Candida albicans
aggagatggattaggaggcgaaag

SEQ ID NO: 5183 - DNA, 24 bp, Candida albicans
gcagttgtgctgttaattgatgcc

SEQ ID NO: 5184 - DNA, 24 bp, Candida albicans
agcaccttcttcaccaccagaaac

SEQ ID NO: 5185 - DNA, 24 bp, Candida albicans
tcctgcggcaactctaccaatagt

SEQ ID NO: 5186 - DNA, 26 bp, Candida albicans
tctgggatagcattgaacaacaaaga

SEQ ID NO: 5187 - DNA, 24 bp, Candida albicans
tttggatgtcccagatgatgtttg

SEQ ID NO: 5188 - DNA, 24 bp, Candida albicans
ggtgacgagcttctcgttgaattt

SEQ ID NO: 5189 - DNA, 24 bp, Candida albicans
taaagctcgtcattccaactgggt

SEQ ID NO: 5190 - DNA, 24 bp, Candida albicans
acctaaacgagtgcttggaactgc

SEQ ID NO: 5191 - DNA, 24 bp, Candida albicans
cccaaagacttggctctatcaacg

SEQ ID NO: 5192 - DNA, 24 bp, Candida albicans
gggtatgggaacattgctaacgag

SEQ ID NO: 5193 - DNA, 24 bp, Candida albicans
aacaacttcaattcacgcaaagca

SEQ ID NO: 5194 - DNA, 24 bp, Candida albicans
tgccacagaagacatttgaattgg

SEQ ID NO: 5195 - DNA, 24 bp, Candida albicans
tgctatcctttgtgttgccagtgt

SEQ ID NO: 5196 - DNA, 24 bp, Candida albicans
aaatcccttgaaccaaatcaccaa

SEQ ID NO: 5197 - DNA, 24 bp, Candida albicans
gtggaggtttggctgaattagtgg

SEQ ID NO: 5198 - DNA, 24 bp, Candida albicans
gcatcaatgccggtaaacattgta

SEQ ID NO: 5199 - DNA, 24 bp, Candida albicans
caatcgtaccttcatcatgagcca

SEQ ID NO: 5200 - DNA, 24 bp, Candida albicans
attggtgatggtgccaaataatcc

SEQ ID NO: 5201 - DNA, 24 bp, Candida albicans
tgatccatccaacaatccaacaag

SEQ ID NO: 5202 - DNA, 24 bp, Candida albicans
aaagtgacaatccatgaccaagca

SEQ ID NO: 5203 - DNA, 24 bp, Candida albicans
tcctgtgaatcctcttcaccaaca

SEQ ID NO: 5204 - DNA, 24 bp, Candida albicans
aagcccctttattttcagggtcaa

SEQ ID NO: 5205 - DNA, 24 bp, Candida albicans
caattgttcatcagcagattgcat

SEQ ID NO: 5206 - DNA, 24 bp, Candida albicans
cgggaaatcagtctgaatgttggt

SEQ ID NO: 5207 - DNA, 24 bp, Candida albicans
aaatcttcaaacccttcgtccgtt

SEQ ID NO: 5208 - DNA, 24 bp, Candida albicans
tgaagagttgttcatttgcatggg

SEQ ID NO: 5209 - DNA, 24 bp, Candida albicans
ttgttggtaccttcaacagctgga

SEQ ID NO: 5210 - DNA, 24 bp, Candida albicans
tcaccaaaccactatcagcattgg

SEQ ID NO: 5211 - DNA, 24 bp, Candida albicans
ggtcgatgttggtggtgatgttac

SEQ ID NO: 5212 - DNA, 24 bp, Candida albicans
ggtgttggaattgatggtgtcgta

SEQ ID NO: 5213 - DNA, 24 bp, Candida albicans
ttgcagttcctgatgctttcgtag

SEQ ID NO: 5214 - DNA, 24 bp, Candida albicans
catttgggaaatcgattgtttggt

SEQ ID NO: 5215 - DNA, 24 bp, Candida albicans
tgctgctctgaaatcattacccaa

SEQ ID NO: 5216 - DNA, 24 bp, Candida albicans
tgaaccttcttctccatctagcgg

SEQ ID NO: 5217 - DNA, 24 bp, Candida albicans
atttctttcaatcccggtcaacct

SEQ ID NO: 5218 - DNA, 24 bp, Candida albicans
actgctgccaggtggtgtactact

SEQ ID NO: 5219 - DNA, 30 bp, Candida albicans
tgaactttaacattgaaataagcttctgga

SEQ ID NO: 5220 - DNA, 28 bp, Candida albicans
tctccaggtaaatggaaattatcaacac

SEQ ID NO: 5221 - DNA, 24 bp, Candida albicans
ctccactattagaatgcggcgagt

SEQ ID NO: 5222 - DNA, 23 bp, Candida albicans
taaagattgtctttggcccataa

SEQ ID NO: 5223 - DNA, 22 bp, Candida albicans
cgctcgtgaattcaacatttaa

SEQ ID NO: 5224 - DNA, 24 bp, Candida albicans
caaaggtgacagattaactggttg

SEQ ID NO: 5225 - DNA, 20 bp, Candida albicans
ttattgtcgttggtcggtga

SEQ ID NO: 5226 - DNA, 26 bp, Candida albicans
tcaaatgagataaacctaaaacagca

SEQ ID NO: 5227 - DNA, 25 bp, Candida albicans
ccaatcatacctaaaaatgaaccaa

SEQ ID NO: 5228 - DNA, 21 bp, Candida albicans
aatccacaggctaaatgcatg

SEQ ID NO: 5229 - DNA, 25 bp, Candida albicans
aaatattgatgcacgtgattaaaca

SEQ ID NO: 5230 - DNA, 30 bp, Candida albicans
agtaaattgtaaaattggatccattaattt

SEQ ID NO: 5231 - DNA, 22 bp, Candida albicans
tgaatcgatcctgaatgttttg

SEQ ID NO: 5232 - DNA, 20 bp, Candida albicans
tgatcccatcccaaattcat

SEQ ID NO: 5233 - DNA, 24 bp, Candida albicans
ttaatgattttgatcgcaacaatc

SEQ ID NO: 5234 - DNA, 25 bp, Candida albicans
tccttcacgtaattcagaatcttct

SEQ ID NO: 5235 - DNA, 22 bp, Candida albicans
tctttgtttagggaggcgttag

SEQ ID NO: 5236 - DNA, 24 bp, Candida albicans
ttgttgtttgttgtcattcctttt

SEQ ID NO: 5237 - DNA, 27 bp, Candida albicans
ttgacgataaactagtaacacaacgtt

SEQ ID NO: 5238 - DNA, 25 bp, Candida albicans
ttccttcgtgagacttgatataggt

SEQ ID NO: 5239 - DNA, 22 bp, Candida albicans
ctctttacgttaccggttttcg

SEQ ID NO: 5240 - DNA, 23 bp, Candida albicans
atccaatcttagtctccgctttt

SEQ ID NO: 5241 - DNA, 21 bp, Candida albicans
tttggctcttgtgtgtcctct

SEQ ID NO: 5242 - DNA, 28 bp, Candida albicans
tcattaatactgtcttccttagtgatgg

SEQ ID NO: 5243 - DNA, 19 bp, Candida albicans
ggaaattcgtgctccgttt

SEQ ID NO: 5244 - DNA, 23 bp, Candida albicans
cagggaatattttcattgattcg

SEQ ID NO: 5245 - DNA, 26 bp, Candida albicans
tgatctaattcaacatcattttcacc

SEQ ID NO: 5246 - DNA, 20 bp, Candida albicans
cttttcgggttcatcctcaa

SEQ ID NO: 5247 - DNA, 25 bp, Candida albicans
tgagtttaaacactttaggtttggg

SEQ ID NO: 5248 - DNA, 27 bp, Candida albicans
ttggatttaacaagattttgaattttc

SEQ ID NO: 5249 - DNA, 23 bp, Candida albicans
gtattttggtgtttgctttacgc

SEQ ID NO: 5250 - DNA, 26 bp, Candida albicans
caagatttaaaatatcattgccttca

SEQ ID NO: 5251 - DNA, 25 bp, Candida albicans
tttgacaactcttcataacaaatgg

SEQ ID NO: 5252 - DNA, 22 bp, Candida albicans
ctccaatgaacttgtcggtaca

SEQ ID NO: 5253 - DNA, 23 bp, Candida albicans
ttctccatatttactccagcagc

SEQ ID NO: 5254 - DNA, 24 bp, Candida albicans
cgagctcatttgagtttaacattg

SEQ ID NO: 5255 - DNA, 25 bp, Candida albicans
ttttcaattttgaattgtttggatt

SEQ ID NO: 5256 - DNA, 23 bp, Candida albicans
gcaagtgtggaattgttgtcata

SEQ ID NO: 5257 - DNA, 25 bp, Candida albicans
tcatcttcttcaggtttaacagctt

SEQ ID NO: 5258 - DNA, 27 bp, Candida albicans
ggagtgttattcattaatcgttctttg

SEQ ID NO: 5259 - DNA, 26 bp, Candida albicans
tgataagtaactgatgctacagcaca

SEQ ID NO: 5260 - DNA, 21 bp, Candida albicans
tgttttaaatctggcttcccc

SEQ ID NO: 5261 - DNA, 22 bp, Candida albicans
tggagcactgaaattgttgatt

SEQ ID NO: 5262 - DNA, 25 bp, Candida albicans
cacagaaaagcttctcttattggaa

SEQ ID NO: 5263 - DNA, 27 bp, Candida albicans
tcacctgaagaattaaaatcaaaatct

SEQ ID NO: 5264 - DNA, 22 bp, Candida albicans
ttatttaaagacggcacagcct

SEQ ID NO: 5265 - DNA, 22 bp, Candida albicans
tgaccatctccaaattcagttg

SEQ ID NO: 5266 - DNA, 26 bp, Candida albicans
tccttgtcatcaaaatagacatcttt

SEQ ID NO: 5267 - DNA, 26 bp, Candida albicans
caataaaccaatgtaagctaaatgga

SEQ ID NO: 5268 - DNA, 23 bp, Candida albicans
acgatcatctaatcttgcctcag

SEQ ID NO: 5269 - DNA, 27 bp, Candida albicans
tcaaatcatgtttcattatactggatc

SEQ ID NO: 5270 - DNA, 24 bp, Candida albicans
gttgcaatttgggaatatatggtt

SEQ ID NO: 5271 - DNA, 29 bp, Candida albicans
attgatttattggttacgtcatctaattt

SEQ ID NO: 5272 - DNA, 22 bp, Candida albicans
ccttgggtccagtattcaaaga

SEQ ID NO: 5273 - DNA, 22 bp, Candida albicans
tccaacacgaagtttttgattg

SEQ ID NO: 5274 - DNA, 26 bp, Candida albicans
gatcaggggttatatgaacataatga

SEQ ID NO: 5275 - DNA, 27 bp, Candida albicans
tgcttctttttcttcttcaagtttaac

SEQ ID NO: 5276 - DNA, 22 bp, Candida albicans
gccggaaacttttataggtgtg

SEQ ID NO: 5277 - DNA, 20 bp, Candida albicans
gaatccacaatcgatttcgg

SEQ ID NO: 5278 - DNA, 28 bp, Candida albicans
gaaatctggatgaatattaatttgttga

SEQ ID NO: 5279 - DNA, 23 bp, Candida albicans
aagctgggtcaaatatgttttga

SEQ ID NO: 5280 - DNA, 27 bp, Candida albicans
ttgaaggaaggataatctaaatgtttg

SEQ ID NO: 5281 - DNA, 24 bp, Candida albicans
tgcacaatatctttttcaccaagt

SEQ ID NO: 5282 - DNA, 27 bp, Candida albicans
ttgagggaaattcttattaaatgtttc

SEQ ID NO: 5283 - DNA, 22 bp, Candida albicans
atgatgggactaatgtaacggg

SEQ ID NO: 5284 - DNA, 18 bp, Candida albicans
ttgacgcctttggcaaat

SEQ ID NO: 5285 - DNA, 20 bp, Candida albicans
gaatccacaatcgatttcgg

SEQ ID NO: 5286 - DNA, 23 bp, Candida albicans
ttcaacaagccaataactttgct

SEQ ID NO: 5287 - DNA, 21 bp, Candida albicans
tcacaagccagtagctttgct

SEQ ID NO: 5288 - DNA, 24 bp, Candida albicans
cgtaaggtcagagccaattatctt

SEQ ID NO: 5289 - DNA, 24 bp, Candida albicans
ttgtgtcaatgcctctttaatttc

SEQ ID NO: 5290 - DNA, 21 bp, Candida albicans
gttgccacagttactgcaggt

SEQ ID NO: 5291 - DNA, 25 bp, Candida albicans
tttgaaactagttgtaatcgccttt

SEQ ID NO: 5292 - DNA, 23 bp, Candida albicans
ttcctgttgcctgttttagttgt

SEQ ID NO: 5293 - DNA, 25 bp, Candida albicans
catcaccaacattattaattggtga

SEQ ID NO: 5294 - DNA, 26 bp, Candida albicans
ctttcttcctgttctctaaatgatcc

SEQ ID NO: 5295 - DNA, 26 bp, Candida albicans
tcttacccagttctaccacttctttt

SEQ ID NO: 5296 - DNA, 25 bp, Candida albicans
ctcataacatgacattgttgtttcc

SEQ ID NO: 5297 - DNA, 24 bp, Candida albicans
taaacaccacatcataatgaagcc

SEQ ID NO: 5298 - DNA, 26 bp, Candida albicans
tgctaaaagaagactgatttcgtaga

SEQ ID NO: 5299 - DNA, 25 bp, Candida albicans
aaagggtgtactgtagggtttcttt

SEQ ID NO: 5300 - DNA, 23 bp, Candida albicans
cccgggaaatttttctttatatg

SEQ ID NO: 5301 - DNA, 21 bp, Candida albicans
tttaggcactcgatgaactgg

SEQ ID NO: 5302 - DNA, 23 bp, Candida albicans
atcaatggacatgaattgtgtca

SEQ ID NO: 5303 - DNA, 22 bp, Candida albicans
aaactctctggcgcgatattag

SEQ ID NO: 5304 - DNA, 19 bp, Candida albicans
aaatgcagcatattccccc

SEQ ID NO: 5305 - DNA, 27 bp, Candida albicans
ttgtcgatatttatacctctatcggtc

SEQ ID NO: 5306 - DNA, 23 bp, Candida albicans
tcaatctatgtcgtgtaccatcg

SEQ ID NO: 5307 - DNA, 26 bp, Candida albicans
gcatacaccttgatttaaagaattga

SEQ ID NO: 5308 - DNA, 24 bp, Candida albicans
tcgattcattgatgatttgattct

SEQ ID NO: 5309 - DNA, 24 bp, Candida albicans
tagctcttgtttcatttgatttgg

SEQ ID NO: 5310 - DNA, 26 bp, Candida albicans
tccaaacctaaatcagaagtaaatga

SEQ ID NO: 5311-6000 - skipped (690 entries)

SEQ ID NO: 6001 - DNA, 1644 bp, Candida albicans
atgtttagaaaaggactaatcagatttcaacatactctcacccatactatgaaacgtccagttagtaattccatagtgttaacaacaactgaggaaaagattcgtaatgttttggttggttactgtgattattacaacaagactaataatgattcacttgaattgagaattaccggaggctgggttagagataagttgttgggcaatgaaagtcacgatattgacatagctgtaaatcatctaactggtgaggagtttgtcaatggacttcacgactatctacgtcagcatgaaccagaattatcaatgaatcatgttcacaccatcaaaatgaaccccgaaaaatccaaacatttggaaacatgcactacaaagttatttggagtagacattgactttgttaatttaagatcagaagaatatacccatgatagcagggtgccatctattgagtttggaactccggaacaagatgctgttcgtagagatgccacattgaatgcattattttacaatttgaaccaaggagaaatcgaggattacacgaaacgaggcttatctgacttgcaaaatggtatattgaaaactccattggctcctatcaagacatttttggatgatccattgagaattattagattgataagatttgccagtaagttcaattttgttgttgaatcagaaaccttgaatgcaatgaaagaagaacacaataagtcggcattactgactaaaataagtaaagaaagaattgaaattgaattgagaaaaattttaaccagtaacaatcccggttatggattacagttgataaactacgttgatttggcaagtagtatattctatgttcctgagttagcaaaagagtttgataatgaatcattggaggaagcacgttcccaacttgcttgtcacatggaaattgccagtttaatctacccaaatttcaagcaaactatcaataattcaactgagaaatttaagaatgagtttgccgcgttaatgaccaatgatgactataaaaatgttttctggttatctgtcatattgcacccatacactaatgtcaagtcatgcaaaccaaacagagacattttcaaccagtatttgaggttgggtcttacttcgaaaaagagtgatattgctaaagtttcagctatcaatatgaactctgctgagctttcgagatttttcagtgcacctgaacttgttaagagatcagatattggtctttatttaagaaaattttctgaatttgcatcattgaatttgattgtcaatgctcttttggattgtgtgagaaaagttgatcaatttactcaattaccaaaagagttgcctgttccatttcctgaagtaggagaaaagattttaggagatgaaaatatcaataaagttatttcagaaattgttagtagatacgagaatttgtttgttcagattgaaaattgggatttgactaatgttcatttggtgaaacctttaattgatggaacaacattatcgaaatcattgggaatgaaacctggcccatggttgagaccaactatagaagaaatactagtatggcaattagataatcctcaatcaagtgtggatgagtgctttgagtttgtaaagtccattattccaaaatacaaatag

SEQ ID NO: 6002 - DNA, 1356 bp, Candida albicans
atgtcgggagataacacagggaataaatccaattcagcaccttcaaaatcaattgaagaattgttgaaattattggctatgggacaagaattatccccggctcaacaaaaggaaatgaaagattataaattttggaagactcaacctgtaccatcattaagtgaaaccgtcactgaagaaggtcctattgataaattgaaaactccagaagatgttcctaatgatccattaccattgatcagtgattttgaatggagtactttagatattgacgataatttacaattggatgaattatataaattattatatgataattatgttgaagatattgatgccacatttagattcaaatatagtcatgaatttttccaatgggctttgaaaccaccgggatggagaaaagattggcatgttggggttagagtgaaatcaactgggaaattagtagcttttatagctgctactccggtcacttttaaattaaataaatcaaataaagtgattgattcagtggaaatcaactttttatgtattcataaaaaattaagaaataagagattagcccctgtattaatcaaagaaatcactcgtagggttaataaacaaaacatttggcaagcattatatactggtggatcgattttacctacaccattgacaacttgtcgttatcaacatcgcccaatcaattggtcgaaattgcatgatgtggggttcagtcatttacctccaaatcaaacgaaaagcagcatggtggcaagttatacattacctaataatcctaaattgaaaggtttacgtccaatgactgggaaagatgtttccaccgtattatctttattgtataaatatcaagaacgatttgatattgtacaacttttcaccgaagaagaatttaaacattggatgttgggtcatgatgaaaattcagattctaatgtggttaaaagttatgtagttgaagatgaaaatgggattattaccgattatttttcatattatttgttaccattcacagtattagacaatgctcaacatgatgaattaggaattgcttatttgttttattatgccagtgattcctttgaaaaaccaaattataaaaagagattaaatgaattaatcactgatgcattaattaccagtaaaaaatttggagttgatgttttcaattgtttaacttgtcaagataatacttatttcttaaaagattgtaaatttggtagtggtgatggttttttaaattattatctttttaattatagaacattccctatggatggaggaattgataaaaagacaaaagaagttgtcgaagatcaaacaagtggtataggtgtagttttattataa

SEQ ID NO: 6003 - DNA, 906 bp, Candida albicans
atgactacgatgactactgaagaaatattggcttcttatccacaaatcaccgctccaaccgatcaaacaggttacacatcaaatttaacacctgaacaaaaaaccactttagatatattcagacaacaattaactgaattgggttataaagacagattagatgatgcatcacttttaagatttcttagagcaagaaaatttgatattcaaaaagctattgatatgtttgtagcttgtgaaaaatggagagaagattttggtgttaataccattttaaaagatttccattatgaagaaaaacccattgttgctaaaatgtatccaacttattatcataaaactgataaagatggtcgtccagtttattttgaagaattgggtaaagttgatttagtgaaaatgttgaaaatcactactcaagaacgtatgcttaaaaacttggtatgggaatatgaagccatgtgtcaatatcgtttacctgcatgttcaagaaaagctggttatttagtggaaacttcttgtactgtgttagatttactgggtattagtgtgacttcagcttataatgtcattggttatgttagagaagcttcaaaaattggtcaagattattatccagaaagaatgggtaaattttatttgattaatgctccatttgggttttctactgcatttaaattatttaaaccatttttggatccagtgactgtttctaaaattcatattttaggttatagttataaaaaagaattattgaaacaaatcccacctcaaaatttaccagtcaaatttggtggtatgtcagatgtttctgatgacgatttattattaaaagatgttggtccttggagagatccagaattcattggtccagaaggtgaatgtcctagagcttataacatttaa

SEQ ID NO: 6004 - DNA, 1461 bp, Candida albicans
atgactacagttgaacaacttgaaactgttgatatcactaaattgaatgccattgctgctggtactaataagaaggtgccaagagtagtggctgctgggttaggtggtaaattaatgggtacttccgatttagttaaggtcactgccgaagaaatcaccaaagattcaatggaatcattagctgaaaaggatgccagagaaaaggcaaaatatgccaacaagaaacacatttcagaagagccatggactttagacaattttgccaaaaaaatcaattggcttaacatgattttggttgttttcatccctgtatttggagcttactgcgcctggaattacccaccccaatggaagactctagtgttgacatttgtcatgtatgcctttagtgggatttccattactgctggttaccatcgtttgtattctcacaaatcatatgatgctgctttgccagtgagacttttctttgcctttttcggtgccggtgccattgaaggttcaatcaaatggtggggtcattctcatcgtattcaccacagatacaccgatactccaagagacccatatgatgccagaagaggtttctggttttctcacatgggatggatgttgactaaagccaacccaaagaacagagctagagccgacatttctgatcttgttgccgactgggttgtcaccttccaacacagacattatttgttgcttatgattacagctgcatttattttcccaactttggttgctggattgggctggggtgactactggggagggttcatttatgctggtattttgaaaggttttgccattcaacaagctactttctgtgtcaactccttggcccattggattggtgttcaaccatttgacgatagaagaacccctcgtgatcatgtgttaacagcatttgtgacatttggtgaaggttaccataacttccatcacgaattcccaagtgattacagaaatgcattgaaatggtaccaatacgacccaaccaaagttaccatttggtgtttatccaaacttggattggcctggaacttgaagaagttttcccaaaatgccattgaacaaggtttagtccaacaacaacaaaagaaacttgatagaatgaagaacaaattgaactggggtgcagaaatcgaaaaattaccagtctggactagagaagaattcaacgaaagagctaaacaagaaggattgattatcatttctggtataattcacaacgttaagaacttcattaaagaacaccctggtggtcaagctcttgttagggcttctttgggtaaagacgccacaaaggccttcaacggtgctgtatatgctcattcaaatgctgctcacaacttgttggcaaccatgagagttgctgtagttaaagatggtgaagttaacgctgacacttttgatttacaagaacaaatgatggagaaggaaaagcaatcttag

SEQ ID NO: 6005 - DNA, 3030 bp, Candida albicans
atgagctataacaatcccaacaacagcaacagccatcttcgtcctcatgcttacaacaacagccgtcgagacgattcagatggtgatgaactgtcgattgaatttcttaaccaaagaagcaacactccattaacacaaggaacttataattatcataatacttctactaattcacttaatttccaacaaccagaaccaatttatcgtaatcaaactcgtacatctttaagtgattcttattatgatcatcccatatttgacacttctcaaacacagatccaacctccacatgataatccattcactgaaagttatgaaatgacagatacttcatatcaaggtaatgatcatcattatcgtactggtcaacctaatcatctcatgaaccccacttataaccaagctttcattcctcatgtttatgatgaagaagataatgatgaacaagaatatgatcaacgtattcagtataatcaatttcaaggggatcattttgatttggcagcgattagttatgctgatgatgaaagtcaaagtcagttggactatgtccccactgaacgtgtcatacctgaaggagaggaagaagaagaggaaggtgagacgagttttgaaaaagaacctggtagtgaaaccatttctggcccatttggagaagaacgatcatttgaagaacctcctccacaacaagaagtccgttccaagaaactcactcgagccacaggtttaaatggacatttagttttggattgtcctgttgctgatgaattattatcgaaattccctgattataatcctgctgaaaaatctggtggtttatcaagagaatttgcctttatgagatatacagcagtaacttgtggaccatcaaatttctatcgagatgcttatattttacgaccagtacattatccaatacctcgacaaacggaattgatgattgttatcaccatgtataatgaagatgatatattgttaggacgtactttgaaaggtgtgtttaaaaacatcaaatatttggaatctaaagctcgttcatcgacttgggggaaagattcatggaagaaaattgttgtatgtattgtcagtgatggtcgtacaaagattaatgaaagagcacaagcattattggcagggttaggtgtgtatcaagaagggttagctaaaagtagagttgatgataaaaaagtgcaagctcatatgtttgaatatactaccagagtgggtatttcaaaagttactgatgatgtagttaaattgactacagaaaaagttgtccccgtacaaatgttattttgtttaaaagaaacaaatgctaaaaaaatcaattctcatcgttggtgtttccaagccattggacaagttttagatccaaaaatcgtggtgttattggattgtggtactcaaccatcaggaagatcattatatgaattatggaaagaatttgatcgtgatcatcgtgttgctggtgcttgtggagaaattactacatcattgaaaaaacgtcaaatgattactaatccattggtgtatggacaaaattttgaatataaaatatctaacattttagataaacccactgaatcatcatttggatttatttcggtgttacccggggcattttcagcgtatagatttattgcattacaaaatgatattaatggggttggtccattagaaaaatattttaaaggggagtttttacacagtagtggagaacttgatccaaatgatgatgaatttcaaatgaaacatttaatgttgaaagaagaggcagggatatttacttcgaatatgtatttggctgaagatcgtattttatgtttcgaattagttgctaaaaggggttgtaattggttattacgatattgtaaatcagcaagagctgaaaccgatgttcctgaaggattagctgaatttatattacaaagaagacgttggcttaatggttctttctttgctgctatatattcgttagttcatttttataaagtatggacaagttctcattcatttggtagaaaaattttcttacacattgaatttttttatcaattaattaatcttattgtgtcttggttttccattggttcatattttttggtgtttaggatattgacaacttctttaggagataaggctttgggttttgctccgggtaagattttatcggtgatatttctttggttatatcttgcatctattgtaactacatttgttttaagttttggtaataaacctaaaggtacagaaaaattttatgtcacgattgttattttctttgccatattgatggcatatatgatatttgctgctattttcatggctgtacattctattcaagatatttatcgatcaggaacaagaataaccgtttcattatttttccaaaattcagaatttagagatttggtggtggcaacttcatcaacttatgcattatatttccttgcatcatttttatattttgaaccttggcatatgtttacatcttttgttcaatatattttgctttcaccatcttatgtcaatgtccttaatatttatgcattttgtaatattgatgatatttcctggggtactaaaggtgaagttggtggtaaatcattgggtgaagctaaattaagagaagatggtacattcgatgttagtgttcctatttccaaagaacaaatcaatcaatcttatcttgatcaattggaaaaaattagagatccagcacctccagaagagaaagtgcttgttactaataccgaagattattatgctttcattagatccatgacagttttggtatggatgtttacaaattttgttgtcattgccttggttttagaaactggtggatttaatcaatttgttgaagccaccgatttggccaacttgaagagtaatcgtgctgcagtatttttgacggtgattttatggacagtggcatttatggcattatttagatttattggttgtatttattatttgatcactagattgggtagagaaattaaggcaagtgaacatgccactaaatag

SEQ ID NO: 6006 - DNA, 1398 bp, Candida albicans
atgtttcctaattcacctgatgctttccatcaagttaggatgatgcaatccctgatcaaagcaagtaatttcaagttacaatcaatggaatttagatgtcattcaaataatgtatgtgaatatcaaatggaaatgttgcatcacttgttatcagttgaagctaaaacattgcctaatttatcattaattgaacagcaaccagaaatcaaattaggtatgagaccattgttgttggatttcttaatggaagttatcactattctcagcttgtctagatctacattccctttgactgtcaatttgattgaccgttattgttcaaccagaattgtcaagaaacaacattaccagttgttgggattgactagtctttggatcagttgtaagaacttggattcaaagttcaaagttcctacattgaatgatttgagaaaaatttgtgttgacagttattacaaagaattgtttgtggaaatggagaaacatattttaaaatcattagaatgggtcgtcaatgctccgacatttgatgcctttattgatttgtattcaaacttgttgatttctaacagcagtaactttgaggttgcaaacattataaaaaaatcatctcataaaataaaattgttttctaattatattggtgaattgttccagttttatccaaacatttattacgattacacatcgtcacaaattgctttgattgctattttaatcacggtcttgacgttgaagattcctgttgatttaattagtttgttgaacttttacaatggattggttaaaactgaaatgtttaaatccaatgttgaacaaggtgctgaagaccagtttgaggaaattctttcagttgactctttcaaatcattattcaataagagtttcttcaagaacttgatcaagataattgataatcctccaagcagtctcaagattaagtactttgctgagaatggtaaatattcggtattgatgaaacagttggtcactactgcttccaacaccttgaagtgtatattggatcctgttccaacaacaccaaaggctaatagttttgtcaaacatcaacaacaacaacaccattatcacccaagaccgccaatgagtatcaatacctcaatgattccattgacacctgtttccaatagcactagccctaatagatttagtcctgatcagatattttcggaaaatgagtctacacctggtattgcctttggtaccatgacacctgattcccaatcaacatcacctggggaaaaacgaagttatgaatgcattgatgagttagagattggcacatcaaccattgctggttacacactcaaaaatcatgatacattgaaaagatcgaagagtgctaattatggtacacttttctatcttcaacaataa

SEQ ID NO: 6007 - DNA, 1029 bp, Candida albicans
atgacatcgataaaacatccaaaaccatctactgtaagtgctagcagccacggaatacgcactccaccaacagtttccacatccccagatttggatgtcaacagaatccccatggtgacaccgaaaccgtcaacaaataatttgccagttaccacgccacaacccccaccagccataacgcaatcaatgcgtaacaaaagtggtttgcctgacagtttaccacatgttaaatgtttagccagagcacgtatcccaacaacacagggaccagatatcttcctacacttgtatgaaaacaatattgacaacaaggaacacttggcaattgtgtttggagaggacattcgatctcgctcattgtttaaacattatcctggagaaactcaacaagacagaatgactagaggtgcttacattggtagattgactcctggaagaaccattgctgattcagatggaacaaatgaattgaagtttgacaaagatggtaacttgattattgacagtttgacatacacggatccaactttggtcaggatacacagtgaatgttacactggtgaaactgcatggagtgcacgatgtgattgtggtgaacaatttgatgaagctggaagaataatgggagaagcaggccatggatgtatggtatatttgagacaagaaggtagaggtattggtttgggtgaaaaattaaaagcatataacttacaagatcttggtgccgatacagtggaagccaatttgattttgagacacccagctgatggacgtaacttttctttggccacggctatcttggttgatttgggtctagtagaaattaaattgttaactaacaacccagataagattgttgccgttgaaggtaaacaccaagaagttaaagtgttagaaagagtcccaatggtacctttgagttggggtaaagatggtaagaatggtatcaaaagtaaagaaattgaaggatatttgagcaccaaaattgagagaatgggtcatttgttagagaaacccatcaaaatctaa

SEQ ID NO: 6008 - DNA, 1533 bp, Candida albicans
atgctttcgtttaaacaattccgagtatctacgtcatcattactcacgagaagaataagatcaagacatcattcatcttcaacatttaaaactgccgtagaaaccgcagaaaaattagtaacaccaccaacatcaaaatttctggatccattttctatagttagtcatgaaatgtccaatttagctaaatcaatagctaatttaattggatcaggacatccaacgttaaatcgtgttagctcatattattttgaagctgaagggaaaaatgttcgtccattaattgtcttaattttatccaaggcattactgaaaatccctcttgaacaaagaaatagaattccgattgatacaattgatgtcactgaacaaaaaagttttaatggtacaccaacaaaacagaatagtaccattgctgggaaatctattgatgattcattatctccattggcaattttacatggaataaatcccaaagtgatattagatcctttatctaaaccaatggataaattaccaattattaatgggcataataaacctggagacaaagataactcacagggacaacttgatatattacctaaacaacgtcgattagcagaaattgttgaaatgatacatacagcatcattattacatgatgatgttatagatttatctgattctagaagaggtagaccaagtgggaatattgctttcactaataaaatggcagttttagcaggagatttcttattggggagagcttcagtggcgattgctcgattaagaaatcctgaagtaattgaattattatcaactactattgctaatttagttgaaggggaatttatgcaattgaaaaatactgtattacaaaataataataatgatgaaatttttaatgatggtgatgttaaaagtattccacaaccaactggaaaagtaccaactaaacttcatcaatattctgtacagcaacaacaacgaacaacaaatggaggaaatggaggtgattctgctgatgctgctgttgttgttgatcatgaaattaatgtcgaagcagcatttgaatattatttacacaagacatatttgaagacagcatcattaatgtccaaactgtgtcgtgcagccgcagttttaagtggagcacaagatgatatcattgaaaattgttatcaatttggaagaaatttaggattatgtttccaaattgttgatgatatgttggattatactagtagtgataaaaccattggtaaaccaagtcaagctgatttgaaattaggtttagctactgcaccaatattatttgcttggaaacaagaaccaaaattaggggatttgatagctaggaaattcaatcaaccaggagatgttgaaatagctagaagagccgtggaaaaatatgatggagtagctcaaactaaagaaatggcaaccatgtattgtcatcaagctttaaaaaatttaagagttttaccagaatcagaagctagaagtgccttggaattgttgactaattctgttttaactcgaaccaattga

SEQ ID NO: 6009 - DNA, 1185 bp, Candida albicans
atgttgtggaaactactacgtttattcattattattaaactcattcaactagctataatttatttctcaccatgtcaatttgatacttcatctgaattgatcattcaaaatttatcatccacgtcatcatcaaaatcttattataatgtcatcatcactaccatactaaataaattgattgtttgggattcagtttatttcaatgatttattcataaatcctattcaatttgaacatcaatttgtattttgtcctggttggattcaattaatcaaattgttgaatatcaaaaattattacactgcccaattgacaagtatacttatatccaacttgtgtcattttgcctcagtgattacattgtattatttgactaatgaaatggatatgaaatttggattagtgagtggtttattgatgattatatcaccagcaggagtgtttttgactggaaattatagtgaaaatttgagtaatttattgacattattgatgtttctcacatattataaatcaataaattttaatgatgttaaacaacctagtaataaatctataactaatattttgggttatattattagtggtatattctgtgcgattaattttactgtgagagcaaatggattattactaggagtgatttatgttttcgatttatatcatttcatacaaaataaatcgtcatcacaaattatattatctattatcacaggatcaattttatttatgacatttttaatgacaaatatttatcattatataaaattttgccctggaagagaatggtgtaataatactttccctagtctatttcaatttgctcaacatcattattggaatgtgggatttttgaaatattggactcctaataatatcccaaattttattcttgtattaccagtgttaatattcaatatttattcattgggttatatgtatcaagaattacccaaaaatagaaaattattaccattgatcgttataaatggattaatagttgttgggggtacatttttttggaatattcaaatattaaatcgtatcacaagtttttctccattgatttattggacattggcttataatttaaagaaaccttgggctaaatatgccattggttattgcatagtatggaattttgttcaaactggattatttgcagcatttttacctccagcatga

SEQ ID NO: 6010 - DNA, 930 bp, Candida albicans
atgtatagacgagcttttgttgggctgtcacgtctcttttcaacttcttcctatttcagatcttcatacaccagtgcagctagaaagaccattgcggatatacatgagttatacaaaacgggagagtctatctcgatggtcacatcccatgactttattacatcacagatattagaacaagcaaaagttgacataaatcttataggtgactctttggccaacacaactttaggatacgacgacaccaatgagttaacacttgacgaatttttatatcatgtcaaatcagttcagagaggtaactcccattccttgttggttgcagatatgccttttggaagttttgaaagttcgattgaacaggctactacgacagcagtaaaactaatacagaaaggtaaaattcaagctgtgaagatcgaaggaggcaacgaagagattatccctaccatcaagaaaatagtttcagttggtataccagtcatgggtcacgttggattgactccccaaaaacataattcgttaggagggtataaacttcaaggaagaagtgttgatgattccgtcaggatttttcaagaatgccttaatttacaaaatgctggggtgtttgcaattgtgttagagtgtattcctaataaattgtctcagtacataacagataagctttcaattcccacaattggaataggtgctggaccttatacttcgggccaggttttggttatatctgacttgttgggaatgaaagatgggcacgtggctaagtttgttcagcagtataacaatttcttccaacagggtgttgaaggtgtaaaacagtataccaaagatgtcaaatcaaagaagtttccaaatccggatacacatggttataaaatgaagaaagatgtacttgatgagttcaaagaaattgccaaagatttgtag

SEQ ID NO: 6011 - DNA, 3011 bp, Candida albicans
  misc_feature (979)..(979): n is a, c, g, or t
atgaagttttctcattcattgaaatttaatgctgttccagaatggcaagataattatattaattatcctacattgaaaaaaactatttataaattacaacaagatcaacttgttcataatgggaatcaagatcaaggttttattgttggtactaatcaaactactgttagtcaattggttaaagattttgaacatattcaaagcactgctaacaccaccaccaacaacatcaaaaacactaatggtgttgaagttgatgatgaaaaaactaataaacataatcatccatttggtgataatataataaaacatcgattaactaaaaacatcatttctaaattcaaaagaaataacaacaccaatgccaccaacaattctaataactatggtagtgaaagtgatttagaaatcaatcaaactagtttagataatgaaaaagaatcagaaactaaatcatttactggtgaattagaatatacttcaacttcttccaatggtgaacatgacaccactgccactaaacatgaattgatattacaacaaattttgaattctaatgatgaatcatatattaatcctaaatcattaacatttgatccattaaaaattttcactaaacaattaattggtgaattaattaaaattaatcaattttacaattcaaaagaatcgggaattttcaaaatttataatattttaattcatgatttacaaaatcgaaatattaatattgatgatgtatttaaattcactcaagcttataattattcgatgcaagtataataaatcgtatggatcatgatcattatcatttaaagtcagctttatcaagaacagttactaatgctagtgtatttgataccattaatcatattgataatgattatgataataataatagcaaccaaaagaataattatgatttggagaaacaaaataatactacagttgcaattcatgatgatgatgattcagaagncgatgaagaagaagaggaagaagaaactcatagtcatgattcagtattacttaatcatacacattttaatgttaaacaacaattaaaaatcacattaaaacgtaaagccattacattatttataaatctttctgaattaaaatcatttattgaattgaatagaattggattcacgaaaatttgtaaaaaatttgataaaacttgtggttattcaattaaacaagattttattaatgaatttttacctcaatattctcgagtatttgaaaatgataccattgaagaattagattataaattgaatcaaattattaaaatttatgcctttttatcaaataaattaactactcaatcaacaactaaagaagatttggataatataaaatttgaattaagatcttatttacgtgatcatattgtatttgaaagaaataccgtttggaaagatttattatcattagaaaagaaatcttataatattgatttagataattctgtggttcaaaataataaaatgggtgatgaaggtcatataattaattcaatgatgaatttatccatgaaaagaattaatttaccacaatgccttaaaaaattgattaaatatgatcatattgatattccacaatttttattaactactcaaatgcttaaaattattattattgtcattgttttcattatattattagcagtgaaaacttttaatgatccagttcaaggtcgttgtttagcagtattagttgctgctgccatgctttgggcttcagaagcattaccattatacactacagctttattaatcccacttttggttgttacttgtaaagtttgtaaaactccgggaaccgatgatccaatggatgccaccaaggcatcacaatatatttttgggacaatgtggaattccacaattatgatattaattggtgggtttacattagctgctgcattatcaaaatataatcttgccaaaatattatcatcatatattttagcattagcaggtacaaatccaagaaatgtattattggcaatcatgtgtgtatcattatttctttccatgtggatttctaatgttgctgcccccgttttatgtttttcattaattcaaccagttttaagaagtatccccacagattcccccgttgctaaagcattagtgttagggatcgctttggcgtctgatgttgctggtatggcttcaccaattgcatctccacaaaatgttattgctcttgaatcaatgaatcctaatccaggttgggggaaatggtttgctgtggcattacctgtggcaatcattagtttaattttaatttgggtggaattattcatgacgtttaaaatcaataatgttaaaatcaaacaattcaaaccaattaaagaaaaattaaccatgaaacaatggtttgtatttgccgtcacaataactactattcttttatggtgtgttatgcaaaaaattgatggaacatttggtgaatcaggtataatcacttgtatcccaattgtattatttttcggtaccggtttattaaaagttgatgatttaaataattatccttggtcaattgttatgttagccatgggtggtattgcattagggaaagccgttacttcttcaggtttattgaaaactattgctttagcattacaaaaacgaattatgcattatgatgccattgttgtattaatcatttttggagcattaattttggtggtagctacatttgtaagtcatactgtatcagcacttattattatcccattggttaaagaagttggagattcattacctaaacctcatccattaatgcttattatgggtgtagctttaattgcttcaggggcaatgggattaccaacttcagggttccctaatgtgacggcaattggtatgagagatgaagttggtaaaccttatttgacggttaatttatttattactagaggggttccggcaagtataattgtttatgtttgtattatcaccattggttatggtattatgtcatcattgaacttttaa

SEQ ID NO: 6012 - DNA, 1533 bp, Candida albicans
atgccttcctcatcacaagtttatagatctactagatctagccaaccagaagaattatcctttgaagatgttgttatgactgggttagctcccgatggtggattgtatttaccatcagctatccctcaattacctaaggactttttaagtaaatggactgacttatcatttaatgaattggcatttgagatattaagattatatatcaatgagaatgaaatccctaatgccgatttgaaagatttgattaccagatcatactcaacattcagatcatcagaagtgactccattgaaaaaacttgatgacaatttatacattttggaattatttcatggtcctacttatgcattcaaagatgttgctttacaatttgtcggtaatctttttgaatatttcttaactagaagaaatgcacaaaaggatttgactaaacaaccaagagatatcattaccgttgttggtgccacctcaggtgatactggatcagctgccatttatgggttacgtggtaagaaagacgtatctgtatttatattatatcctaccggaagaatcagtccaatacaggaagaacaaatgaccactgttgaagatgaaaatgtccatactttatcagtcaatggtacctttgatgattgtcaagatattgtcaaactggtatttggagacaaagaatttaatgataaatatcatgttggggctgtcaactctatcaattgggccagaattttggcacaacaaacatattatttctattcttatttccaattacagaagcaagctaaaactactaataaagtcagatttgttgttccttcgggtaatttcggagatattttggctggttattatgcttacagaatgggattaccagttgacaaattgattattgccaccaacgaaaacgacatcttggacagatttataaagtcaggtgaatacgccaaggaacaagaagttggtgtcaaggcaacttattctccagcaatggatattttgatctcatcgaattttgaaagattgttatggtacttaatcagagacaacgttcctgaagttaacaagagtgacgaaaaagccggtcaattattgaatgattggatgaaacagttgaaagaacaaggcaaattcaaagtcccagctgaggtcattgatgcagcaagacaagtttttgattcacaaagagttgataatgacactaccgtacaaaccatcaaacaagtgtacgacaagtctgctgataaatatgtcattgatcctcacactgctgttggtgtcactacttcttattcatttattgctaaagatacagagccaattcaatacatttctctttccactgctcatccagccaaattctccgaggttgtcaataaggctcttgattcatttgatggttactcatttgacaaagatgtcttgcctgcagaattgaaagctttgagcagtaaagagaagagaattaaattgattgatgaagctagtgttgaaaaagtcaaacaagccattaaagatgaattgaaattttag

SEQ ID NO: 6013 - DNA, 1110 bp, Candida albicans
atgactaccgattcagttccagctaaatttcaaggttttgcttcctctaacaagaatacttggaataaaccaaaattagtttcttatgatagaaaacaaatcaatcctcatgatgttgttcttgaaaatgaagtttgtggattatgttattctgatattcatactttacaatccaattggggtgaatacaatcgtgatgatttagttgttggtcacgaaattgttggtaaagtcattgctgttggtgataaagtcaccgaattcaaaattggtcaacgtgttggtattggtgctgcttcatctgcttgtcgtgaatgtaatagatgtaaatctgataatgaacaatattgtgctaaagctgctagtacttataatgctcctgatgtcagatctaacaactatgtcacccaagggggttattcatctcattcaattgctgatgaacaatttgttttcccaattccagatgatttaccaagtgcttatgctgccccattgatgtgtgctggtatcactgttttctccccattgttacgtaacttgggtagtgatgccaaaggtaaaactgttggtattattggtattggtggtttaggtcatttggccttgcaattggctaaagctttaggtgctaaggttgttgccttttcaagaacctcaagtaaaaaagaccaagctttgaaattgggtgctgatgaattcattgctactaatgaagaaaaagattggtcaagcaaataccatgacacttttgatttcatcttgaattgtgcttcaggtgttgatggattaaacttgcaagattatttgagtgttttgaaagtcgataagaaattcatttctgttggtttaccacctgctactgaacaatttggtgtttcaccattcactttcttgaaacatggtgcttcttttggttcttcattattgggatctaaagtcgaagtattggaaatgttgaaattggctggtaaacacaatgtgaaaccatggattgaagaagttccactcagtgaagaaaactgttctaaagctttgaacagatgtcatgatggtgatgttagatacagatttgtgtttactgaatttgataaagcttttgcaaagtaa

SEQ ID NO: 6014 - DNA, 1254 bp, Candida albicans
atgtctgttgcttctaatccatatggtccaaatccatctgatttcttatctaatgtgaataaatttgaagtcattgaatcaactttaagagaaggtgaacaatttgccaatgcctttttcaccactgaaaaaaaaattgaaattgctaaagctttagatgattttggagttgattatattgaattgacttcaccagtagcatctgaacaatcaagaagagattgtgaagccatttgtaaattaggtttaaaagctaaaatattgactcatattagatgtcatatggatgatgcccgtgttgccgttgaaactggggttgatggggttgatgtggttattggaacttcacaatttttaagacaatattctcatggtaaagatatgaattatattgctcaaagtgctattgaagtcattgaatttgttaaatctaaaggtattgaaattcgttttagttctgaagattcttttagatcagatattgttgatttattaaacatttatcgtactgttgataaaatcggagtgaatagagttggtattgccgatactgttggttgtgctaatccaagacaagtttatgaattggtcaaaactttgaaatcagtggtttcttgtgatattgaatgtcatttccataacgatactggttgtgccattgctaatgcttatactgccttggaagccggtgctaaattaattgatgtttctgtgttgggtattggtgaaaggaatggtattactccattgggggcattaatggcaagaatgattactgctgatcgtgattatgtgttatctaaatataaattacacaaattgagagatttagaaaatttggttgctgatgccgtacaaattaatattccattcaataatccaattactggattctgtgcttttactcataaagctggtattcatgctaaagccatcttggccaatccatcaacatatgaaattttaaatccaaatgatttcggtttaaccagatatattcactttgctaatagattgactggttggaatgccattaaatcaagagttgatcaattgaatttacatttgactgatgatcaagttaaagaagttacgaataaaattaaaaaattgggtgatgttagacaattgaacattgatgatgtcgattcaattattaaagatttccatgctgaacaaagcactactaatactcctcttttaaaaccagtagaggatgatgaaggtccagaaattaaaaaacaaaaagtatag

SEQ ID NO: 6015 - DNA, 1491 bp, Candida albicans
atgagttcagttaagtatgatgctattattattggtgcaggggttattggtcccaccattgcaactgcttttgccagacaagggagaaaggttttgattgtggaaagagactggtccaagccagatagaattgttggagagttgatgcaaccggctggtatcaaggcattaagagagttggggatgatcaaagctattaataatattagggctgttgattgtactgggtactatatcaaatattatgacgagaccattactatcccttatccattgaaaaaagatgcctgtatcactaatccagtgaagccagttcctgatgccgttgatggtgtaaatgataaattggatagtgattccacattgaatgttgatgactgggattttgatgaaagagtacgtggggctgcatttcaccatggggatttccttatgaatttaagacaaatttgtcgtgatgaaccaaatgttaccgcagttgaagcaacagtaacaaagattttgcgtgatcctctggatcctaacacagttattggtgtgcaaacaaaacaacccagtggcactgttgattaccatgcaaagttgacaatcagttgtgatggtatttactccaaattcagaaaggaattaagtcctactaatgttccaaccattggctcttactttattgggttgtatttgaagaatgctgaattaccagctaagggcaaaggtcatgtgttattgggaggacatgcaccagcattgatatattcagtgtccccaactgaaacacgtgtattgtgtgtttatgtttcatcaaaacctccttctgctgctaacgatgcagtttacaagtatttgagagataacattttgccagcaattcctaaagagactgttcctgcttttaaggaagcccttgaagaaagaaagtttagaatcatgccaaaccagtatctttctgctatgaaacaaggtagtgaaaaccataaagggtttatattgttaggtgattctttaaatatgagacatccattaactgggggtggtatgacagttggtttaaatgatagtgtgttattagcaaaattgttgcatccaaaatttgttgaagattttgatgatcaccaattgattgctaaaagattaaagacattccacagaaaaagaaagaatttggacgctgttatcaacacattatctatttcattatattcattatttgccgctgataagaaacctttaagaatattaagaaatggttgttttaaatatttccaaagaggtggagaatgtgttaacgggccaattggattattgagtggcatgttaccattcccaatgttgttattcaaccattttttcagtgttgccttctattcggtctatttgaattttatagaaagaggacttttgggattcccattggcattatttgaggcatttgaagtgttgttcactgcaattgtaatctttactccatatttatggaacgagattgtaagatag

SEQ ID NO: 6016 - DNA, 1521 bp, Candida albicans
atgacaattagtcctaataaaagacaaaaacgtgattcttcatcacctaaaaaacacctcatcctcaatgcatttgatatgatgtgtccatcacttcaaactgcaggattatggagtcatcctgaagataaatctcgagattataataccattgaatattggactaatttagctaaattattggaaaagggaaaattcaatgctcttttcattgctgatgttttaggtggttatgatgtttataatggacctcgtaatttaactgctgctgctaaatctggagctcaatggccaattaatgatcctcatgcaattgttcctgctatggctgccgttacagaaaatttatcatttgctattacttcaagtaccgtcagtgaatcaccttatcattttagtcgtcgattagccacgttagatcatttaaccaaaggtagaattggttggaatattgtttcatcatatttggattctgcagcaagaaatttactcaatggcggtccattacctgaacatgatgaacgatatgttaaagctcaagaatttgttgaagttgtatatcaattatttttgtcttcatgggctgatgatgccgttaaatttgataggaaaacaagagttttcactgatccggaaagaattagagaaattaattataagggagaacattttattgttcctggacctagtattactgaaccaactccacaaagattgccagttattttacaagcaggtgcttccaaaaaaggtttagaatatgctgctaaaaacgctgaagcagcgtttattaatggtatgaccccggaagcactaaaagtcaaaattgatcaattgaaaaaattggtgaaacaacatggtagaaaccccgatgatgttaaagttttatcattagttaccgtgattgttgctcctactcatgaagaagccattgctaaatatgaagaatataaatattattctgatcctgaaggtgcacaagctctttttggaggttggacaggaatcgatttagggaaatatgattatgatgaaccattagatcaagttgaaagtaatgctgtaagaagttttgttgaaagttggacaaaaccggtacctggtgaagatcccaacacaaaaaaaactagagctactgtggttaatcaattacaaattggtggatcagggattttaattgttggtgatcccgaagaagttactgaagaattaattcgttggcatgaaatctctggtgttgatggattcaatttcacttatgctgtcacaccaggtagttttgaagatttggttgaatatgtcattccattacttcaagaaaaaggttatgctcaaaaggaatatgcaactaatgaaaatggtaaacctcttacatatagagaaagtatttatggtgctggtaatgggtttttgagacctgatcatcctgcttataatttaagatggaaagctgaggaatctaaagaagaatttgaagaaaagttgcaaaagactttgaaagagaaatttggaaaaacttag

SEQ ID NO: 6017 - DNA, 528 bp, Candida albicans
atgttgggattaggaggatacttttatggaggtaaacaatgggaaaacaaagaagaaacccctatgcctaaagatgtccctgatgttgatgaagtaggagcaacatcagcaccattattatcagcatcatattatattggggataaatgtaaaccatttaatgaggactttttattatgtaaagaagaacacaatggaggtactctagaatgtatgaaagaaggtagaagggtgacaagatgtgccatttccgtattgaaagatataaataaatattgttttgatgaattcaaattacattatgaatgtttagaacaaaataatcaatattttagtcgttgtcgttcaagtgaaggggttttaagtaaatgtgtttttgataatatgaaattggttaaaaaaattcctggtgttgaacaacaaattcaagataagaaaaatccaatttatccatctgatccaaatgatgttaaaaagaccgcagaatttttgaaatcaaaagaagttacagctgttgaacaaagttaa

SEQ ID NO: 6018 - DNA, 2169 bp, Candida albicans
atgggtatcaaaagtgaaaaaaccgacattgacaataaactcaatttttccgggttaacgttggcaagtggacccgacactccagtgtcaaacgaagaacccaactttattgatattcttcacaatagtaaattatctgattttctgagttttcgatacaatgattatccgtcacaaccagacattaatacatcagaaataacttacccaggttttttacccagtgtccctgaagctattgttcatctcaagttactaaaagcattttctgtcttaaaaagaaaagtcattggtagcaataacttaatccctaacgaatatgacgttaaaaaatggcaaatttatataactgatgcatctagaagatttataatattcatgtcttcaataagatcgaaatttggtacaattgaaagtgatgacgaaaaagatatttatgataacgggaacaccaagaatgagaaattcatattaatgatgaaagaattaatgccacctttggatgtgatcatggtgtggcatgcatttttattgaaccctaaatcaatgtatgatgtatgtatcagaaacaaaatttaccaatttgcaaactacccgttgccattgcatattattgaccaatttatcgatgattacacctttgaattccatgttcctcaatcgtacaaacagaattatttggatttgttgaggtcattcaccaatgatccacttgacttgttatatgataacagcagaattgccatgaatgaacatttagtgactctttattgtcccaaatgtcacgacccaatgacaaagcctataccgattacaaacgatgaaaacactggattttgtgacacagatttccagacaattaatataggttatgagaatgtgaaatgctatcatggtacaccctctcattttactcatgatgaattaagaaaactacaattgtattgtgatatgacaaacctgaaatcattacaaggaactcataagtatttctccaaagttatttgtcctcctaaattcaccaaaagaaacccatttcttattagtgatgatgtttgcaaaacattagagaaacactgggatatcaataagtcattggatgacattttgaaatctttgaatgccaagcatagacgtgaattagtgcgacaaagaatattgttgcgaaattatttgcaatataatttgattagtttgacagtacgtggaggagtccaggttggtgaggatttggtggggtgtgtattacgtcaagaacgatttgttgaaaaaatgaataaattagattggttacattcacctttggtatttaaaagtctacaagaagctgttttgaggtactcacgattctttgaaatgttaactgatgcaaacttacgacaaatgttggtacctactttagacatagatttggcatggcatactcatcaattgaccatgtatggctattttcgagattgtcgagggtcagcagtacacactgtgattgatcatgatgataaagtagacgaagggagattagatgatggattttcattcacagcaaaaagatataaacagttgtataaagaagaatactcggtatgtttttgtttatactgtacttcaaaacggtccgatagtcttcgtaaattcagccagtttttcaaaacaaaaaagcaaacgaaaaaggaagaatatcttcgacaatcacatccattgttcagcaggggtgaaggtttttcacacattagtgcccacaactcggtgagattaccaacagaattggctagttcaagaagagaaaagaaaccggctccatgggctgataatacgtatttactttatactactcctttgctttttgttgttcctccaattgctccaataactgaaggtcaatgtgacttttacggtaatggcttgtgcacatcggcaaccacactgtgttccagtattggtggtacatgttgtaacattgctccttgttcaggtaatggtggtgctgcatgttttggtactggactaaaccccagtaattatggccacgcaagaattggtggtagtgttgttgaaataggtggtgtatgtggtgccgacaataattccacttctgcgggttgtgtcggtgctagtggatgtagtggtggagctgctgggaattgtactggcggaggaagcgggttttga

SEQ ID NO: 6019 - DNA, 2022 bp, Candida albicans
atggagaggctgaataaatttatggacatcttttcaaattcaaacccacacaccaccccgttagatttcctgagttatagatatatcaacacaccattagatccattgccaattgacactaaaacagttcaaccaccgcaattcatacccacaataaatgaagcaattgttcatttaaaattattaagggctttccaagtcatgaaaaataaagtattaattgattatgaaacagatgaagaagaatattgtgagaaacgttggcaaagttttataactttagctgttagaagattcattttatttgtttcggcaatacgtataaatgctcctggtggtcaactgggtcctgggacagaatcacaaatattcaataatgctaacataaaacaagattcttttgtaaagtttatgaatgatttaatgccaccattagatgtaattatggtatggcattcatttttattgaatccaaaaactttctatgatacttgtttaagaactaatgttttgaggtttgctaatttccccttacctttatataaattaaatcaattcattgataattatacttttgaatttaatgttaaccccaccccacaggaaaattatttaaatttaattagatcatttactaatgatgaaagcgattatcaatatgacatcgctaccaaattttccttatataaacaaaaagtgagattttattgtcctgggtgtaaaaaagtattaactgattgggtaagaataagtgatgaaaatcaaatggggttagctgatagaaatttaagtgttagaacattaagatcacgatcattcgtggtggaagaattacccccatcaaaatgtccttgtattaacatttatatgataactcatgaatcacttcgaatactccatttgattattgatgcaagaagaaaatatcctttactccctgggactttcaaatatttctccctggttatttgtaatccaaaatattcagcacgatcaccaacaactcttagtgaagacatttgtctagcagtacagaaaagttatctggcaacaaaggatttaacgactataataaatgatatccctaaagaatatgccaatgaaactactcgaagaagggtcattttaagaaattatcttcaatttaattatattagtgctacggtggaaaatggaatcgaagttggggaagatttggttgggtgtgtattgagacaagaaaggtttcttgaaaagattaacaaaatggattggttacattctccattaattcatgaaagtttactggagtcattaatacgttataaaagattctttttgatgttgacagctgaccggtatagattgaacatattggtccctactttagacattgatttattgtggcatacttatcaattgtcaatgtatggatatttccgtgattgtcgaacatcaccttgtcattatgttattgatcatgatgataaaattgatgagaatagattagatgatgcgtttgcacgtactgctagacggtatcgacatttattcaaagacaattattctatttgctattgccaatattgtacaaactatcgaaccaaatacgccaataatgggctcctaaccttatttcagacgaaaaagaaattggaaattaaagaaaatgctataagaaacaatccattgtttgacggagagaaacaaggtggtgtgactcatattagtattcacaattcaattcaaatgccaacaaagaaggccacaaagagacgtcagaaaaaccccgtgccttgggagaataataggatagatggtggtcattatgtggttgtacctgatgctcctatcacgactgaccattgtcaattctatggcacagggttatgtaactctgtgaatgctcaatgtgttagtgattcaggtaaatgttgttcgtttgctagttgtacatcatttggaggttcagcttgtgtaactgatagtggtctggcttgtggaggagatggtggagacgggggtggttgtggtggtgattag

SEQ ID NO: 6020 - DNA, 1383 bp, Candida albicans
atgttgtttttattattcttattaattactcccatttacgctggtcttattttccctaccaaaccatcaagcgatcccttctataatcctcctaaaggttttgaaaaggctgctgttggtgatattttgcaatccagggaaaccccaaagtctataactggtagatttgctcccctcaagatccaaaactcatggcaacttttagttagatccgaagattcattcggtaatccaaatgctattgtcactactgttattgaaccagtcaacgctgatccatccaagattgcttcctaccaggtttttgaagatgcagctaaagctgattgtgctccttcctatgctcttcaatttggttctgatttgactactttcgttactcaagctgaaatgtacttgatggcaccattgttagatcaaggatattatgttgtgtctccagattatgaaggtcctaagctgactttcactattggtaaacagtctggtcaagctgtgttgaactctattcgtgcaaccttaaaatctagtaaaatcaccaacattaaagaagatgctaaagttgtcatgtggggttattctggtggttcgttagcctctggatgggcagctgctttacaaccaagctacgcacctgaattgagtagcagcttgttgggtgctgccttaggtggatttgttaccaacattactgctaccgcacaagcagctgatggtactgtatttgcaggaattgtggcaaatgccttgggtggtgttgctaatgagtatccggaattcaaatcaattttgcagagtgatacagacaaaaaatcagtgtttgatgaatttgatagtcattgtttagctgatggtgtgatcgattatatcaatactctgttcttaactggtgacaataagattttcaaaactggttgggatattttgaaaagcccaacaattgctaaaatcgttgaagataatggattagtttatcaaaaacaattagtgccaaaaatccctatatttgtctatcatggttcaattgatcaaattgtccctattgttaatgttaaaaaaacttatcaaaattggtgcgaaggtggtatttcatctttggaatttgctgaagatggtactaatggtcatcttactgaaaccgttgtgggtgctcctgctgccttgacttggatcattgatagatttaatggtaaacaaactgtttctggttgtcaacatgataaaagattaagtaactttcaatatccaaatatttcttcttcaattcttaagtatttcaaagttgctttggacaccatgatgctgaatggtcttggttctgatattcaaaaagataaaattaccccagacgaccttagaaagtttttattaggaggctggtaa

SEQ ID NO: 6021 - DNA, 2259 bp, Candida albicans
atgtcagaattcatagttgatttgtttccttcagaaatctccaaactttatttgttcacttcattttccgtcttgtgtggagcagttttcttttctgccaaagtcaacaagaccattaactcagttttagtattttgttgggcttgctttatcaaacctttaattcagaaaaagactaaaggtccaaacaaaaatcaacaacaatctttagagtcattctacaagaatcaagctcatatttatgataacactagagaatttttgttgaaaggtagacaagaatgtcttagattagctatttcccatttacccaaaaagaaagatcttatttggattgatattggtggtggaactggttccaatattgaattcatggatgaaattagtaaaatatctgaaaactttaaagctgtttatttggttgatctttccccatctttgtgtgaagttgctaaggcaagatttgaagcccatgaatggacaaatgttcatgtattagttgctgatgcctgtgattttactattgattatgatagtgctgatttgattactttttcttattcattgtcgatgatcccaactttcaatgctgctatcgataatgctgtttctaaattagatatggaaggtattattgccactgtggattttggtattcaaagcagtgacacctcaatgggtcgtatcaatactgttggtgggttggttaacagggacattccttggatattacgtaatttttggagaatttggtttgaagctgataaagtgtttttggattcttcaagaagaaactatttggaatataaatttggtaccgtcaaatctttgaattcatacaacaaggctttgggtaaaatcccctattatatttggattggttgtgataaatcaaaatcacacaccattttagaaagattgaattgtttagccactgaatccccttaccttgctccaactacaactccaatcgctaatcaacttgaagatattccaatttctaaaggtcatgaagctgctttaatcaacttgcaaaaaaatttaccttacccatcaatgtactatcaaaaggaatattggagagtctactatgatgaaatgaatccattgtatgaacaatttaaaaaccaatacatttatgctttcacttgggaagatcctcgtgaagatcataaacttttgaattttaccagtgatgatactgttttggctattacttcagctggtgataatattttgagttatgctagtttaccaacaccaccaaaaaagattcatgctgttgatcttaatccatgtcaaaaccatttattagaattgaaattggctagttttagatgtctttctcaagaacaaatttggtcaatgtttggtgaaggtaaaatcgaaaatttcaatgatcttttgattgatactttggcaccgcacatgtcttctaatgccttccaatactggatggataaaggacctaaaactttttctggtaaaggtctttatgatactgggttttctagatgggcattaagattatcaagatatgttttcaaagtttgcggtgttagtaaatacgttgaagaactttgtgctgcaaccaccatggaagaacaattgagaatttggaatgaacatttgaaaccaactttatttaatcctgtggttggttcattacttgttggtaatccaatgtttttatggaaagctttgggagttccagctaatcaagcagctttaatgggaccatctgttattaaatatgttgttgatactttggacccaatcattaagagatcgatgatttcaaatgataactatttctactatttatgtatgatggggagatacaccaaaaacaattgtccagattatttaactacaaaaggtttcaacagattatctagcactgctgctactgccagcggatcatctccaattgacaaccttagaatccacactgacactttaaatgaagtgtttggtagattaaaagaaaaatcaatcactattgccattatcatggatcatatggattggtttgaccctaatggtagagatgctattaatgaaattactgctttgaaaagatgtcttgccccagggggtagagtattacttagatcagcaagtacaaagccttggtacttgaaaacattcaagaacttgggattccaagaagaagaaaatgttgttcgtcaacctggttcaagtatagacagagttaatatgtatgccaattgtacagttttaactctcgtagattaa

SEQ ID NO: 6022 - DNA, 1860 bp, Candida albicans
atgactcaagttatagaagacacttatccttatttgcctgtttatgaagctgtcgcaaaagaatctgacaatgacgactgccagccttactttgattttatcacaaccctaaaagaagcaaagcaaactgattatcaaagctacaagtatagaattgacactgattttcccaaaatagacaaactagttttgcggagaccaacgtgtatgccaactattcccgaagctgttgctcatttaaagttgttgaaagcgtttggtgtattgaaggaaaatgtattagggtgtggaaatgatcctgaaaagtaccaaattaaaaagtggaaggtgtttattacatgtgccgtgaggcggtttattatttttgtatctgccttgagggactgttatagtgatggatcttcgtccagagaacttccattctatgaactacaaaaagatgcaagcttcaatgaaacaatggatctgtttttgcctccgctagatgtggttatggtatggcatgcctttttattaaatccaaagacgttctatgacgtgtttacaagagaggagtttattgtatttgcaaagtacccatttccgttggatagacttgaatcgtgtattgacaatgaatcttttgagtataacgtatcggatgagtacaagaccaattatactaatttattgaaaacattcacagacaaagcaaacgatttaaagtatgatgtggggactttttctatgcacgaagagttggttgttgtctattgtccacagtgtgaggtgtcattatcaaagcctattccaatgacaacagatcgggaaactgggtttgccgattgccaattcaaagcaaaacctcaaagcaagaatagaaacattgttttgcataattgctattgtgaagatattgaagagctaactcatgacgaactacgcaaacttcaattgtaccacgatcttcacaactcaaggcccctcccaaatacttataaatacttttcaccagtcctttgcaatccaaaacaatcaagagatcctggcgtagctagtaacaaggttaaacaggctgttatgaaacgttggagctcttccaaacctgtttatgcgatcacaaaagatgtcgatggagggttgggtgattatgcacagtcgaatcttatctgttatacagtgccccgtggtatggtgattggtgaggatctagttggctgtgtattgcgacaggaaatatttaccatgaaaatgaacagcatggattggttgcactcacctattgtgctacagagcgtatctgagtcgttgatcagatatagacggtttttcctgatgatgactgataataatctaacacatatggtagttcccacattggatattgacttgatgtggcatacccatcagctatggatgtatggatatttcaaagactgtttgtcttcatcgtgccatgccgtcatcgaccatgacgataaagtcgaggcaggagaattagatgatggttttctgtttgcttccaaggaatataagaaaaggtataatgaagactattcaatctgctattgccgttattgctcgagccacagaccagaagtgaagcttctgttttggaagtcgtctttgaaatcacgaaagaaattggaaagagaaaagttttcattagttactcatccgttgttcagtttaaatgaagggttgtgtcatataagcacacataactcaatagttttgccccatgatgctgctataagtagaagattggaaagtgatctaccatggaccaaaaaacatttccatttacaagacccagcaaattatgttgttgcaccactggtaccagcaggggccttaatcttttgtaaaattccgatgtag

SEQ ID NO: 6023 - DNA, 2388 bp, Candida albicans
atgtctgaaagagagaaaaagaagttactgactaaattacagtctttatttaatgggatttataagatcgaagataatggttatttaattcatcctactttccaaacattgccattgagatcaggcactgactattataaggttgtacaaaatcccctttcacttcacgctgtgggcagaaaattgaaaaacttgaaatatgcagatgctcaagaattcattaatgacttggctttaatttcgtggaatgctaggttctataatcattcaaaatctgttatttatcgacaagcacagattttgaaacaatacatcaccgatgtggtaattccgaaattgaagaatgacaaagcagttccgaatgggcactctttgatatatcctcatattggagacttgccagatgatagagataacgatgaattactgggattttcttttgagaaaggagagtcgactcccggcccaagtggggcatcaaacgctggctccagaagagatgagtttgaaatgagtgcaactcctcaagcagattcaatggtggcattatcaaaacctttggtgtcaactggatacactagactgtcgttcacaactcctagtcgtcccacgagacaaaagcacaaggataatcaaattgaaagtggtattagaagaggtcgtccaccaattattgataaaccatttgaaacccgtatcaaattaatcttgaaagggtttaagaaattgcgtgacaataatggtcacccattaaccaaacactttgagaagcttccagatataaaaacccatggcgactattatgaaaggattgctgcacctattagtttgaatgagatcagaatcaaggttagaagtagaaaatattcatcagtggaattgttcattaatgatttggatttgatgtttgctaatgcccagctttattatgaaaatgatccttacagtgaagagtttttggactcgcaacaatttaaaaaagaagcccatcttgtaattcaaacggaattgagtaagtcagataaagaaattatacttgctacttcttcttccagtgatggtgttttgcggttcccattagaagtcttggaagttgacgggtatacttacaaaattggtaattgggtgttgatgaaaaacccagccgacccagagagaccgatagtaggtcaaattttccgtatgtggtccacagaagatggaaaaaggtatgtgaacatgtgttggtattaccgcccagaacagacttgtcatgctgtagaccgtttgtttttcttaaatgaagtttgcaaaacaggtcaatatagagatcatttggttgatgatattgttggtccctgttatgttatatttttaactagataccaaaagggtgacttacctgaaggagttataccggaatctgcaccatggtttatttgcgaattcagatataatgagaacacacatgtattcaatcgtattagaacttggaaggcatgtttaccagatgaagtcagagaagatcctgaacaacctttgatcccattaaaggagacaagaaagttgatcaaatatgaatctccaattaaaggattgttagctccggatgcttataaaggtatggatatccccgatgccatccctggtacagctaattcgccacccgtgtcagggtctgtgtatattggtgcaccattgccaaacgatgatttgggtcaatatatttctagtcagaatgttgatgctgttccggaacacgatgaaacgaaaagtggtcgtcgtgcattcttattcacgcccatttcacaattaaaaggtggtggtggttccacaaatacggtgtatgcaactggtccggcagtacctcatgggactatcagtcatgtaccagcaaaacctattgccgatatccctggtttgacgcctctggtggcgcgtaataccaatattttaatcaatcgcgaagaaaagcatcagttaccaggaagttataaactgttacaagagcaaattcaagaaaatcaagctaaaaagcaacaagaacaacagttgcaacaattacaacaacagcagcatcagcaattgtacaaaaagacatctacaccaacacctacaagtattgcgccaactgggactacttaccatacgtcgatgtcaacatattcgaaccttttggttggaggtactcttgcttatgggttgaatgaaagtataggagaattgggtcaatttgtaaataagaaaagaaaaattggtaataatggaaaacaggatgaagaaatcttattctacagagctccaccactcaaacttgtgggaaacaaaattattaccaattcgaatgttgaattggggcattcagctacctatttagcttggaaattgaaacaaaataaatcaaattga

SEQ ID NO: 6024 - DNA, 1563 bp, Candida albicans
atgaattatcatttttcatcagtgacttcaacaagtctaaatcgttatttattttatagatcttctacaaacacagtactgtattggtcttcatctcaatttcatattagactcaaattcactactcgatcaaattgtacgacgacaataacaacaacaacaacaacaactgcattattatcgcgtcatttttattccacattttcaatttttcaacgaccaatgtcaacttcaaacaacaaattgtccaaagaaatttcaccaccaccaccaccacctggccaagattctcatagtcatgtacatagtcatagtcatgattcagaacattcacattcgcattcgcattcaggagcaagtatgcttcatcatcacaaacattcaatgcatgaaccaaatgaacttttagctggaggtgcttctgcaattaaaactaatccagcagtgagaattacttggattggattgttagtcaatgtcacattggcgatttctaaaggtattggtggtgtttatttccattctcaagcacttgtggcggatgcaattcattcagtaagtgatatgcttgctgattttttaactttagctactgtcaatgtagctgctaaagttggtacagcaactaaattccctttaggttatggtaaacttgaaaccgttggtgcatttctggtgagtgctattttattatttgctggtatttccgttggatggtcgtcattattacaaatttttgaatttgtcttgccaactcatctttatgaaattgcctcacatattcaaattggtcacgatcattctcatggtcatggtcatggtcctgtctctgtccaaccagacacccactctcattctcatggtcaaattgatccatcgaatataactacccatcgtgaaattcctaacataaatgctgcctggttggcaggtggatcaattattgccaaagaacttttgtatcgtaaaacaatgcaaattgccgtacaaaccaactcaaaagtgttagtggcaaatgcatggcatcatagagttgattctttgactgctgttgttgctttgtttactgttgctggtggggttttatttaatgttgcttggttggattcaattggtggtattggtgtttcaatattgattattaaagctggttgggattcattaaaagaagcttggaatgaattgattgatcgtggtgaaaaaccgggatctgaattatacaacaaaattgaagggatcattaataatgaattacaaatgaataatgaattgaaacaatttaaattaaatcaattatcagtgttgtcttctggtgctaatactaatattcatatgaatctttcaactacaaataaaaatttaaatttacaaacattgaatcaatacgaaaaaagattatcagatttaattagacaagatgatagatttgttagaaacatttttgttaaatttgaccaagttgaagaagaaccagagaaagttgaagccaaaaaagaagaagatgatgatgatgatgaaaaggaagtaaatggttccaatgatgtacatagtcacaaacattaa

SEQ ID NO: 6025 - DNA, 1287 bp, Candida albicans
atgttttattcactaagaacgttgattataagtattgttattggtataataactttatttacaatttatacccaaatatctaattcaaaatcaggatatgctcctaatttatcaacatttgatacttctcaagtccaattttatgatttggccaattataaaggttcagctaatggttggcaatatgatgaacgagttttattttgtgttccattacgtgatgctgctcctcatttaccaatgtttttctctcatatgaaaaatttgacttatccacataatttaattgatttagcatttttagtttctgattctaaagatgatactatgggagaattaaaacgtcatttaagtgaaattcaaaaagatcctaaattggcatttggagaaattgaaatttttgaaaaagattttggtcaagttattggtcaaggtttttccgatcgtcatggttttgctgctcaaggtccaagaagaaaattaatggctagagcaagaaattggctttggacagtcgccgttaaaccatatcattcatttgtttattggagagatgctgatgttgaaacggtaccaccaacaattttggaagatttaatgcatcatgataaagatgttattgtccccaatgtttggcgtcctcttcctgattggttaggtaatcaacaaccatatgatttgaattcttggcaagaaagtgaaggaggtttacaattggccgatactttagatgaagatgcttgtattgttgaaggttatgttgaatatcaaacttggagacctcatttagcttatcttcgagacccttatggtgatcctgaagtagaaatggatttagatggtattggtggagtctctattttgactaaagcaaatgtattccgtcaaggatctcatttcccagcattttcatttgaaaaacatgcagaaactgaagcatttgggaaattaagtaaacgaatgggattttctgttgttgggttacctcattatgtgatttggcatatttatgaaccttcatctgatgatttaaaacatatggaatggatggcatctgaagaagttcgtcaacaagaagaagctaaaattaaaaaagtttacgataaagtatggaataaagcttttgaagatgttcaaaataattgggataaagaaagaagtaaatttttgaaaaataccgatatgagtaatgtaaggaaaattaaagttgattggtcaggagttgatgattttgatattgataaaaattctcatgatgataaaaaattagccgatttcaatccataa

SEQ ID NO: 6026 - DNA, 624 bp, Candida albicans
atgatcagtatgactaacatctttactcctattgaagaagctttagaagcttacaaaaacggtgaatttttaattgttatggacgatgaagaccgtgaaaatgaaggtgatttaattatggctgctgaattaatcactcaagaaaaaatggcatttttagttcgttattcttcaggttatgtttgtgttccattaagtgaagaacgagcaaatcaattagaattaccaccaatgttagctaatcgtagtgatagacatggtactgcttatactataacatgtgattttgctgaaggtactactacgggtatttcggcccatgatagagctttaaccaccagaagtttagctaatcctaattcaaaaccacaagatttcattaaaccaggccatatattaccgttaagagccgttccaggattattgaaaaaaagaagaggtcatactgaagcagctgttcaattaagtactttggctggattacaacctgctggggtgatttgtgaattagtacgagatgaagatggtttaatgatgagattagatgattgcattcaatttggtaaaaaacatggcatcaaaattattaatattaaccaattagttgaatatatttctaaataa

SEQ ID NO: 6027 - DNA, 1224 bp, Candida albicans
atgactattgaatcaactaattcatttgttgtcccatcagatactaaattaattgatgttactccattaggttcaacaaaattatttcaaccaattaaagtcggtaacaatgttttacctcaacgtattgcttatgtcccaaccaccagatttagagcttctaaagatcatattccaagtgatttacaattaaattattataatgctcgttctcaatatccaggtacattgattattactgaagcaacatttgcatctgaaagaggtggtattgatttacatgttccaggtatttataatgacgttcaagctaaaagttggaagaaaatcaatgaagcaattcatggcaatggaagtttcagttcagttcaattatggtatttaggtagagttgctaatgctaaagatttgaaagatgctggattacctcttattgcgccatcagcagtttattgggatgagaatagtgaaaaattggccaaagaagctggaaatgaattgagagcattaactgaagaagaaattgatcatattgttgaagttgaatatcctaatgctgctaaacatgcacttgaagcaggatttgattatgttgaaatccatggtgctcatggttacttgttggatcagtttttaaatcttgcctctaataaaagaaccgataaatatggttgtggtagtattgaaaatcgtgcacgattattattaagagtggttgataaattaattgaagttgttggtgctaatagattggcattacgtttatcaccatgggctagtttccaaggtatggaaattgaaggtgaagaaatccattcatatattttacaacaattacaacaacgtgctgataatggtcaacaattggcttatatttctcttgttgaacctcgtgttactggtatttatgatgtttctttaaaagatcaacaaggtcgtagtaatgaatttgcttataagatttggaaaggaaactttgttcgtgctggtaattatacttatgatgctccagaatttaaaactttgattaatgatttaaagaatgatcgtactattattggattttctagatttttcacttcaaatcctgatttagtggaaaaattgaaattgggtaaaccattgaattattataatcgtgaagaattttataagtactacaactatggttataattcttatgatgaatcagaaaagcaagtcattggtaaaccattggcatag

SEQ ID NO: 6028 - DNA, 1440 bp, Candida albicans
atgagattttggttcgcatttagggactcagatcggtacgtatattacataatcatcgacaagctaattcttttttttttttttcgccccctttgtttttttctactactgttaattgtttgtttattgttgttctatgtttcatttttaacatctaacagattacattcactttggactattaccatcccccccagatctccaacaatgactagctattcgattgcatttataagtggtgttatactatctatttactactactttgttttgaactatttttctgagttaaagttcagcgaaccaccatatcaacgatataatccactagcgaaagatcaacctaaattagctagtaatcaatatttagacaaaatttatccaccagagaataggaaacagatagggaaagaaaatgccacgatggtaatgttagtgagaaacatcgaattagaaggagcattagaatcaatgcgatcattagaagatcgattcaatcgagattataaatatccttgggttttccttaatgatgaaccatttactgaagaatttatggagaaaaccacattaatggcaagtggtgaaactttttatgaattaatccctgtcgaagattggcaaccaccaatatttattaatgaaacaaaattacaagaaaatttagataattctaaaactaatgttatttatggtggagttagatcttatcgtaatatgtgtcattttaattctgggtttttttataaacaaaaaaaattattgaattatgattggtattttcgagttgaaccaaatgttgaatatatgtgtgattttcaatatgatccatttgaatttcttcgaattaataataaaatttatggatttattattgccattactgaatatgaaaatactattcctaatctttggcccacagtagaatcatttatgaaaaaacatccagaattacttcatccaaataatgccattgaatttttaacaagtaaagaaatttctttaaatcattatatggatttaattccttcagcaactgattataatctttgtcatttttggtcgaattttgaaattggtaatttgaattttttccgtaatgaatcatatgaaacttttttccaatatttagatcatacgggtgggttttattatgaaagatggggggatgctccagttcataccattggattgagtttattggctgataaagattcaattcatcattttgaagatattggatattatcatgcaccgtatttggcatgtcctctggctgacgatgttttggcttctaaaagatgtgtttgtgtttctcgacaatcagaagataaaataaatcgaaccattgatactaatatatatagttgtttacctcgatggtggaaatatggttctggtaaacgatttcttaatcaaattgattataaacgagattaa

SEQ ID NO: 6029 - DNA, 1521 bp, Candida albicans
atgttatctgcttcaactaagaaacttttatcaagactacctattggccgttcaccactgagaaaaattgttttgcattcatccaaactattcagtacttcatcgaaatcctacaaacccctacaaccagaaaaaacttcaggatcgaacccagcattaacatttccctgtctagataaattggagcgtaaaaatgagcagttatctaaaggtaaccttaaatcgtcctcaacatcattggaatcgggaccagaaccaagttacgggaatgtgaaaactggatttcatgtatataaatcaaagaaacccatatttttagattatggtgggcatttacctgaatatgaaatagcatatgagacttggggacatttaaacaaagaaaaatcaaaccttgtattggttcatactggattatctgcttctctgcacgctaaatcacaaccagaaaaccctaaaaatggatggtgggaaaactttattggaccggggaaatatattgataccgacaagtattttgttgtttgtacaaatgtgcttggaggttgttatggatcaaccgggccgtcgtcaattgatcctgcaaataacgaacaatatgcaaccagatttccaatactaagtgtaaatgacatggttcgtgcacagagggagttggtgaaagaccaatttggaattgacaagattcatgcatctatcggtgcttcaatgggagggatgcaatctttagcatatgggtgggaatttccagacgaggtcgaaaagattatttccattagtggttgtgcaaggtcgcatccatattcaattgccttaagacatacgcagaggcaagtgttgatgagcgatccaaactggaaccgtgggttttattataacaaaattccacctcatgttggtatgaagttggctagagagattgcaactgtgacatatcgttcaggtcctgaatgggagtatagatttggtaggcaaagggccgacgagagccgaccacctgcattatgtccagattttttggtagaaacctatttagatcatgctggtgaaaagttctgtcttgaatacgatgcaaattcttggctttatgtttctaaggcgatggacttgtttgatttgggattcaaaagtaggagtaaagcattagaagctagatccaaagctgaattgctgtactcaggcaaagtttccagtgatattcccaaactcgctattcctgaaaccccataccaagaaaagtccacaaaggcaatcactacagtagaggaaggtctcctcgatcttaagaagggaatgtctcgattggccaacaaggatgtgctagttgtaggtgtagagtcagatattttgttcccggtttggcaacagcgtgaaatcgctgacgttttaatggaaaacagtgtttcaggtaaagttgagtatttcgaattgggaaacgatatatccagttacggacacgatactttcttgttaagcttgaatgatatcggtaaaccagttaagaaatttttagaggaatag

SEQ ID NO: 6030 - DNA, 2307 bp, Candida albicans
atggcatcaatcgaacaagacgatctttttaatgttcaagacgatgaagaggaagatattgaagaagaagaagaagaagacgaagatgttgaggatcaagtagaaatagaagaagtgggggagaatgtggatgccctgcaacaagaagaacaggaagaagaagacgattctcaaatggatattgataccgaagatcaacaacaacaagaggaggaagatgaggaggaagatgaagatgaggaagataatgaggaggaggagaatgaagaagaagaaggcgatgaagatgaagaaatggcagatgaagatggcgaaaatgaagacgaggaaggtgaggaagaagaagaagatgaagaagatacgagcaataaaaaggataacaaagatattgaagctactacaaaacctagtctagaaaagaaatccaatgatgaagaaaaaactgaaaccaaatcaactcctgaactgcaattgccctcggctgccattgatgaatccaaggacaatgatggtgatattttcttaggtgacgatactacaaaacaatctgacattccaacccccaaagattcaaatgttgacaattctacatctagagaaggagaattaccagacgactcaaacaagaagaataaggataaaccaattgaacaaccaagaaatgaaaagggccaagaatcagaaaataccaaacttgaagaatcaaaagataaagaacctttaatagaagacggccccaaagatcaaatacaggaagatttagatacaaatttatcatttcgagaacaaatcatacgcaaagcccaaagagccaccgaatttgatattatacctcaagttgccataccatatgctaatcaatgtcatactttagcattcacaaagggacccaaatggatattaaccggaggtgaagatggattcatacgtaaatatgatttcattgcttcaattcaagggaaatctccattaacaatggcacaaaaacataatttattttccgattcattaactaatgctggagtaatatgttcatattgggaaaatgaacaaccattaactagaaaacaattaatgaatcaaaattcaaaactaaaagatagtgatttttccacggggtcagttagttatgaaccaaaaattaatccggtatatgctttagatgcggaaaaaaatgggtattggtgtttatcgggattattatcaggtgggatatctttatatactatgagatataatgaaggtgcaattcattattatttccaccaaggtagtaaagaaaataaatcacgaggtcatactgatgctatatcagtgataaaattaaatcaagagcaagataaatttttatctggatcatgggataaaactatcagacaatgggatttaaatactgggagaactgtattggaatatactgggaattctggtcaaatatcaaatattgaatttagacctgatggattaagtgatgttacgtttgttgtttcagaagaagaggaagagaaagaggaagaaatacagaagaaagagaaattgaataataaatctggggaaaatttggtcaattcaaatgatgatatagattcattatttggtgatagtgataaagatgaagaaatgacagatgcaaacaaaaaagacgaacggttagaagaagagactaggaaagttgttgaatcaattgataaaccaaaatccaataatggagccaccaacaaaacccatttaaattctaatatattcatgtcttcgagtatagatggaaccatcaatatttgggatattcgaacaagctcacccgtgataagattaggagtatctgaagggacgccaccatggtgtatgtcactgacatggtccaataatggagattttatatatgctggtcgaagaaatgggactgttgaagaaatatcgattaaaatgcctcataaacgaagtaatatgggtcatcatcgagataccatgatacctaatatatctaaattattacaatttcctaaaattagtggtcctgtaagtgctatatctactatgccaaatgatgattttttactttgtggatcaaatgataatattcgattatataatttgaaattatatgatgaattaaataatgtttctataaattctaaaaagcaagcaacaccatttttaattgttcctggtcatcatggtggaatgttatcacaattatatgttgatgaaactggaagatttatggttagtgctagtggatatcgtggttggggtcatgggaattatacagatactgtattgatttatgaaattgatttccaataa

SEQ ID NO: 6031 - DNA, 2742 bp, Candida albicans
atgttactactagatatactatcaatcggttggcaaattattattcagactggtacaaatggtttgggagaagattacaccaacggcgacaatgatgggaagaaacctgatccaattcattcagttggtccacaaagggttttcacaacacaattagtcttaactttaatagctgggatgttttcatttttattgttttgtatgttaagattcaaatggccccatatatatgctgttagaacattgagacaaccacgaaataatctgcatattttgcgacctttgcctaataatttatttggatggatcaaagtagtttataaaataactgatgaagaaattatagcttgttcagggctagatacttttgtatatttgaggtttttcaaaatggggatcaagatttttttaatcttatcaatactggcaatatttgtcctaagtccaatacgatattatttcacaggtaattatgataaagagaatataatgacaaaaccaaatcaaccaccagatatcaattatgatttccccagtttctattgggtgtatcctattttcacctatgtgttttcaattgttgtgttttattacttgtttgaatttactaccaccattttgcgaacaagacaaaaatatcttgcttcacaaagttccattactgataggacaattaaattggatggaattcctaaaagattactacaacgagaaaaattaaagaaatttattgaagatttaggtattgggaaagtacttgatgtcaaattgatttacaattggacccccttggaagacttgttacacaaaagacaagagttgatgaataatttggaatgtatatatacgtcaatgtacaaaatggacattgatatttacaatcaacatgaagtcccggcagtcaatccaatttggtctgaaccattagacaaaccacagttgaatgaattagctaataaatacacccaggaattaattgaacttgatggcgagattaaacacatgcaaggtaaatttgacagtgatttgtccactatagatgttaaagagaatcgagaatttaagcaagtgccttcagcatttatcaccatggattcagtggcatcagctcaaatggcagctcaaaccattttggatcctcgtgtatataaattaattgccagtttagcccctgctcctaaagatatcatatgggagaatttgaaattgacttattttgaaaggaaaatcaaatcatattttataacccttgtgattgttttgagttatgggttcattatatttttggttattccattgacatctttgcttgatttgaaaactatcagtaagttctggccagcattaggggaattcataggtcaatccaaatggttaactacatttgtaactggtatcttgccaccattattgtttacacttttgaattttctgttcccatatttctatcaatatttgtctcaattacaaggttacacatctaacagcgacgttgagttatctacattactgaaaaatttcttctttatattttttaacttgtttttgatttatgttgctgcagggactttttgggattatatgtcatatattagcgatacgacaaagattgctgtgcaattagctacgtcgttaagaagaatggcattgttctatgttgatttaattttattacaagggttaaccatgttccctgttaaactattacaagtgagtgattttttcttattgaatgtcttgggcaaattgttttattttaaaagattgatattgaaaacaccaagagattatcgttcttactatttcactccacaaatatttgactttggtatcaatttgccacaacacattcttatatttatgattattttgatatattcagtggtgtccacgaaaattgtcacttgtggattgatttattttatcttggggttatttgtttataaatatcaattggtctacaattttgttcatccacctcattctacgggtaaagtctggccaatgattttccgaagagtgattttagggttaattattttccagttgtttatgtgtggaacattagctctagagagtgccatattgttgtcgattttatgtacaccattgatatttataacaatgattattctatggaattttgaaaaatattatgtgccattgaatacatttattgccttacgagctattttgaatccatatgattttgaaaaagttttcgatcaagatgatcaactgtttagtagcactagcaatgccaacagtaatgatgaatccgatacatcagcaatattagatgacttggatttggatttagatttggagaacgatccaattgacgaatcttcatgtttgctagaaaatggtggtgataatggtaatggtaacgatcatggctctaatggcgagattaataatggatccataactaaatctagtagacagaataatggcgagccaactatttcaagaagaaaatcaacattagatgaagaacgtgaagagtttactgattatacatatccaggattgatagacccactagatggtccatgggttggatttactggaaattttgtcaagatgattgaatacaaatcattgcgtttacaacaacaagcattgttagaagaaggtcgaaatgtgcgtaacgaaaatgaagctgctattggcactacttttattaatgaacaagaattggttgttaataaaaaattatcagttagtgaatgggaatga

SEQ ID NO: 6032 - DNA, 807 bp, Candida albicans
atggattttatgaaaccagaaactgtgcttgatcttgccaacatccgtcaagcattggtaaggatggaagatactattgtgtttgatttaatcgaaagatctcaatttttcagttccccatcagtttatgaaaagaataaatataatatccccaattttgatggaacttttttggaatgggctttgttacaattggaagttgctcattctcaaatcagacgttatgaagcaccagacgaaactccattttttccagatcaattgaaaactccaattttaccgccaatcaattatcctaaaatattggccaaatattctgatgaaattaatgttaattctgaaataatgaagttttatgttgatgaaatcgtgccgcaagtgagttgtggacaaggagatcaaaaggaaaatttgggttcagcatcaacttgtgatattgaatgtttgcaggctatttccagaagaattcattttggtaaatttgttgctgaagcaaaatatcaaagtgataaaccattatatatcaagttgattttggataaagatgttaaaggaattgaaaattcaattactaatagtgcagttgaacaaaaaattttggaaagattaattgtcaaggctgaaagttatggggtagatccatccttaaaatttggacaaaacgtacaaagcaaagttaagccagaagtaattgcaaaattatataaagattggattattccattgaccaaaaaagttgaaattgattatttgttaagaagattggaagatgaagatgtggagttggttgagaagtataagaagtaa

SEQ ID NO: 6033 - DNA, 1515 bp, Candida albicans
atgtataaacagatacttacatttttgattttatttctcagatacatattgtcggagttcccagacgatccttatgaagatgatgacacatcggacgacaacaatagtgattatgaaggacaaaaatgcaatccttatcgggataaagcttgtttggttaatgatgaagcattagggaaaaagatttttgaatcatttgcagaaggtaccaaatattttaccataacaagttctacaagaggagtcagatttgggtctgaagggttagctctaacaattcaagatgaatttgataatcctgctttggtttcaagtttttatataatgtatgggaaagttgaagcagaaatcaaaggagcagcagggaaaggtataattagttcgttctatttgcaaagtgatgatttggatgaaattgatgttgttgaaatatttggcagtgacccttatgaatttcaaaccaattttttcatcaagggcaataccacaacttatgataggggaagatatcatgaaatgcatccttctcctttaagtgaattccataaatatggtattgagtggtctccagatttgattacatggtatttagatgataaaccggtgcgtatgctaggacgtagaaacaaacatggattaccttgttcaccaatgtttcttaaatttagtctttggagtgtggaagatgatgacgagggcacaattgcttgggcgggaggagcagcctcgttttcagaaggaccattcactatgcacattaaaaatctcaaagtgcaagattattccaaggcacttacctattcctatggcaatttacgcgatggtaattggttggatttaagggctgatggagggtatttgtatgaaggacacaagtattgtcttccaccgaaaatgttggacaaacttaaaccaacaccaaagcaagaaactgatgacgatcaagtgttaacaagtagtaaactgcaaagagtagcaacaacaattagtgaagataaaaacactgtttcgtattatcctccctctgctaccaattcacatacaacctgggatcgattactggaatgggaaactgaacaggatgaaacaggaactgatgatacggaaaactccgacaacgaagaagaagagtcaataacagctatacctatttcaaaactgagaaaagggtcaacaagaaggttagacatttcaacacaattacctccactttcacagaatgaatctaaaattgcagaaattaaaaacatcacaacaaccaaacatatccataatacaacaacttctttgcaaatcagtaaaatcaaatccaagaaggtaggggtcactaccacaatttatagcagttcaacaccacaatcaacttctaaatcacggatgccatataatatctttttcaactatccagggaaagaaaattcaagattcaaatcaggtgtttcaagtatattggccacatctttcagtagtgttgtgattgcagaaattttagttatcgtggtgttgttactatag

SEQ ID NO: 6034 - DNA, 1320 bp, Candida albicans
atgtcacaggatttaattgaaacaacagcaacgacaacaaaaatagttgaggcaagagaactaggtcatcaaatccatgactctttacttgaacaattgaagttgcaacaggaagagttgctacaacaacaacgtgacttatttttccaagaacaacagttacaactccaacaacaagtaactcagccagtttctaataatggcaatacttggagttttactcaagggttagtaattggacaagttagtgtaatatttattataattgtatttgtcaagtttttcgtttttgctgattcctcatcacatatccccacaaagcctggtcttgatggtgcgaccggagtaatcgtcaaacgtaataaaaataagaaacatctgaatggacaatttgccaatgacggtgaaaatgaggatgacacatctttggatagtaatcaactgaagatatcttcaattttggaaaagacctattatgatgtcaataatcatgctctggaatcattggattggtttaatgttttagtggcgcagacaatttctcaattgagaagtgaagcattattaaaagacaatatttatcattcattaaacaatttcttgacaaatgcaaaattacccgattttattgatacgataaatttaacagaaattgacattggtgatgatttcccaattttttcaaattgtcgaataaaatatggcgaagatttgaaaagattagaagcaaaaattgatgttgatttatcagatacattgactttgggaatagctactaaattattgttgaatcaaccaagaccattgacagcggtattacctgtgagtatgacagtatcaattgttagattttctggttgtttaacggtatccttgataaatacaaaagacattgatttgaagaacgttgataaaacaagtaatatgaatgggtatagtaaggaaaatgctaatggagacggtgctagcagcagcaacaatgatgaagatgaagatgatggtggtactgcattaatgttctctttttcgccagactatagattggaatttattgttaaatctttaattggatcaagagcaaaattacaggatgtacctaagatttcttcattgatagagaatcagttaaggacatggtttattgaaaggtgtgtagaaccaagatttcaagtggtaagactaccttcattatggcctagaactaaaaacactagagaacctgttaccaaaaaaacaactactacaccatctacaactgtaaacggtacgagtgcagctaccgtcaccactccaggcgaatatgtaaatagtaatatataa

SEQ ID NO: 6035 - DNA, 1821 bp, Candida albicans
atgtctataaactttttatccatccctcgaaacagattcaaagcaatcggtgtgttatccgtcacttgtatacttatatacgttatattacactcctcaatcatcactactgattttgatgtttccgattatggcgataaatttatcccatctataatatttgatgacaacaatgacaatggtgaaaatctcaaggatcctcaacctgaattggataacgataaaggaaatggcgaaactgacactacaacttcaaattccatgacaactgcacacaccttttggaagggtatttttgatacttttgataaatacaaaatggatttaggacaagacccagaaaacgcggtatcatacgtggacaaattgaaacaaaagcaaggtccgcttaataaagaagttttactttcaaaagcaattgtttctagtgaattaatgaaacatttaaaagaaaaacattccggtgtagttgaagatttaccatcagtcatgccaggatcagtatacaataaaggttctaaaggggtagttataattggtggagggaaattctcttggttagcgtatttggcattagttcaattaagaaatgtggggtcaaaattaccagtggaaattgtcatgccatctcgagccgattatgaaaaagaattggaattttgtgaaaatactttacctgaaatgcaagcttcatgtgttgttttgccagatgtattgggtgaagcagttatgaaaaatagaaaatttgccagttatcaattcaaagcattagctttggtagttacatcgtttgaacatatcttattgttagattccgacaatatgattgtgtctaatcctgatgaaatatttgagagtaaattatatcatcaatatggtatgatcacttggccagattattggaaaagaaccatatctccacttttctacgatgtggctgaaattgaagtcaatgaaaataaaagagtgagatataatagattcccattatataacgcaccaaatgttcgtagtaatatttataccgatcaagaacgtgaagaagttcctttccatgacttacaaggatcaattgctgaattatctactgaatcgggtcaattgattattaacaaacacactcatgggaaaactatattattggcattatactacaatttctatggacctaatttgttttataaattgttttcattaggtgaacaaggtgaaggagataaagatacttttgttgccgccgcagttgttaccagacaagattattatcaagttaaatcatttattaaaacttttggatatgctgactctgatgataaatttcaaggtgtttctatgggacaaagaaatcctttaattgatcgtaaacattatgaagatcatgttcttgctttacttgagaaagattcattcaaatcactgtcaattgctgatcaaattgaacaaatgaagaaatttgaaaatgaagattttgatcaacataattccatcccattatttactgttcattgtaattatcctaaattggatccaaaactatatatgtcaagagatgatctttatgataagaaggagaagaaattgaagtatagattatatgggaacttgaaatacactaaagaggtagttaaagacggtgaaacaggtacagaagcgtcaacagacaaagtgcaaattgattttgaattacaacaatggcaacatatgcaagatatattgtgtttgaaaaagatttatttcactcactttattgataatgatatgaatgaattatgtcaatttatagaaaatcaagttgcttggcttagtaagtctcagaattag

SEQ ID NO: 6036 - DNA, 582 bp, Candida albicans
atgaatgaagggtttaaatatgccaaaaatttaacttatacattatttgatcatttggaaaaatccgggaaccttcaagtaaaacaacaacaacaacaacaacaagaagcaactcctaaagataataattcacttgctatttggacatcagtgaaaagaagaactatcgaaaccactcaatttttcgctgccaaaaacatccccattagacatcgagttcaattatctcagaaaaatcctggtataactggaacattaactgatgatgaaattagagaaaaattccctatagaatatgctcaatatgatcatagtccatatcattatcgttatccaagagcagaatcatatcatgatttagcgattaaaattgaaccattaattttagaaatggaaagaatgagtggtgatttattaattattgctgatgaaaccgtattacaagttttttatggttatttaatgtcttgttcttgtgatgaaataccaaatttgaattttaaaccaaatgaaattgttgaagttaaattcaatgcttattcaaattctgctaaaagaatccccattaaagattattcttaa

SEQ ID NO: 6037 - DNA, 900 bp, Candida albicans
atgattttcaactacttgttggcattgtttcaaattcttgttttagcctctgctagagctcaggcagatgaatatgcgtcagacccaaatattttcgagttgacgccttcaaattttgacaaagtggttcacaagtcgaattacactactttggtaaagttttacgccccttggtgtggatactgtcagaaattacaaccagtataccataaattgggcaaatacatcaataaagatgcaaagtattccatcaatattgctagtgtaaattgtgataaggattacaataaacagttgtgttcacaataccaagttcgaggatttcccacattaatggtgttcagacctcctaaatacgaaaaggggaaacaagtaaagttgcagaaacatgccagtgaagtttatcaaggtgagagaactgtcaagtcaatcaccaagtttttaacttcaagattgaaaaattatgtgaaaaagtttcacaacatcagaagtgatggtattgctgaatggttggcagaagatataccttctgttttacttatttccaatgcaaatctggttagtccattgttgaaatccatagccattgattttcttgaccgtgtcaacgtcggaatgatatccaaatttaatgatgagtcgcataaatttgttattggcgataaagaaattgaagttccagctacctccaaatcgagcttgttctattttaataaggaaaagggagagttggtggcttatactaaatctgacaaattaaatgacaagatcaaaataactgaatggataatagaacaaacccagcaacaaccaatagagggcccattatccaagaaggaaaagaagtattactacaaatatagaacaggaaaaaagaaaatagaacatgacgaattatag

SEQ ID NO: 6038 - DNA, 1125 bp, Candida albicans
atgtctgttaaaagatttttctccatgaacgccaaagctttacgagcttttggctccacagttacatccacagccagtgggttcaagccaatgccaatgacagtatctaatgcagctgatactttggccaaagccagatcttcaaaacctagatctgactggaccaaagatgaaattagcaaaatttacaatgctccattgatggatttgattttcaacgctcaattgaaacatcgtgagtaccaaaaacctgctgaagtccaattatgtactcttgttaacattaagcagggtggatgtaccgaaaactgttcttactgttctcaatcatcgaaacatgatactggagttcaagctgaaaaactcgacttggatgctgtgatggacattgctagagatgcgaaagcacgaggtggtactagagtttgccttggttccgcttggagagatatgcaaggaagaaagtctgccttagacaaaatcagtaaagttgttaaacaaatcaacgacgagttgaagttggaaacttgtgttactctcgggatgatcaacgaaaagcaggctgaaattttaaaacagaatggtttgactgcctacaaccacaacattgacacttcaagagaacattatccaaacgtcgtcaccacccgtacatacgacgaaagattagaaaccattaaaaacgtccaaaaagctggtatcaaagcttgtaccggtggtattctcggattgggagaaaccgcacaagatcatgtttcgtttttgtacactttgtccaacatgagtccgcacccagaatcattgccaatcaacagattagttccaatccagggtactccaattgttgaagtgttgaaaaatgcaccaaaggaaagacaattggaatttgatgctattttgagaactattgctactgctagattgattatgcctgaatccatcattagattggccgccggtcgatacaccatgaaggaacacgagcagttcttgtgtttcatgagtggggtcaatgctattttcaccggtaagagaatgttgactacaatgtgtaatggttgggatgaagatatcgccatgttgaagaaatggggtttgaaaccaatggaaagtttcactaagtag

SEQ ID NO: 6039 - DNA, 864 bp, Candida albicans
atgaataaacactttatccgttcgttttctcaaagcggtgtggtcttgagacctggttattctactgtaaatccagtacatcatttggttaaagttgagaaatctaaattaaggccaggattgaaagaactattacttccaaaagatgatatcagatcagtcaaattcaaaccaactgaaatttcacaagatagagtcaacgagtattatcaaaatgccttgcaatctgatttattattgcatttatacgagcatgatgccgagccaataattgggaataagaagcgttcttggggaactgatacaccttttaaattgtaccgtccattgcgaaaaccagttggaagtacaagaccaacgaaaaatatttatccaataaacaacaagaatgttcctaaattagaaagtattgttgttcaatcatataataaaaatgcattggaatcgccctggttgaatatcaccaccagattgcaacttgcgactattaccaatgttaaaccaaagattctttatggtaaatcaaatattttaccatggaaagtgagagtaggaagagcatgtggtgccaaggttgaattatttgatagagacatgagtcaatttattagcactttgaccgaattagtgttaccaagaattagagcatttaagggtatcccaagaacttcgggtgataagaatggtaatatatctatgggattgactccagaagattgtcaatttttccccgaattggaacatttccaagaattattccctaacttgaatggtttacaaattacttttaaaactaccgcacaaactgacaaccacgccaaaaccttgcttagttgttatggtttcccattttctaagaattaa

SEQ ID NO: 6040 - DNA, 1518 bp, Candida albicans
atggctgtctcattagatccacgacctacaatattcacatccagtcatcatgagatcatagtagtcacattgatttgtcttgcccaatttttcactcaagcgggaatcacattatcattgtcgaccatgaacataattctaaaatccttcgataccatcaattcagcaaaacaagtttggtttatgggatcatatgcattaactgtggggacattcattctcattagtgggaaattaggtgacttattgggattaaaattaatttttgttattggatggatttggaccactgttttttctgcaatcacaggattatcaaattatgtttctgttgaatttttcattatttgtcgtgctttgcaaggtattggatttgccctcttgataccgtgtggaatgggtatcttgggaaacatatatcctaatggtgaacggaaaaatcttgtgtttggttgtgtgggtgctaatgggcctgcaggagcattctttggggcattcatagcggccttgattgcacaattgtggtggtggccatggatattttggctattaagtataggttgtgtcgtgttgacgataatttccatgatctacatcccaccaataactcatcacaaattggaaagctatagtgagttctttaaaagaatcgaccctctagggacattaactgggataataggattgattttatttaattttgtatggactcaaggtcccgtggtaggatggaatacggcttatataattgctttattgattattgctgtattactgattgttgcatttttcattattgaactatatattgccaaatatccattagtgccgaaatcagttttcaatcttaaaatcggaatggtcttggcatgtatcagttgtggttgggggtcatttggaatttggcaatattattactggaatattattttgaatctacgaaaatatactcccattgctggttctttgacttatgttccatttttggtcatggggataattgcagctattgcctcatcaataattatttctcatacaaaaccatcgtacataatttccttttcgacaatttgctttatggtgggatgtctcatgttatcagtgacaccaatacaacaatcctatttccgattaacattgggacaaatgttcatattgtgttgggcgatggacatgtcgttccccgctgcttccattatcttatctgactatttgccaaaccatcatcaaggtatggctggttcattggtgtctacggtgataaattactcggtcagtttgtttttgggtatgtctagttgtgtggagaccgaaattaaactcagtacgcacaatgtcttgcttagttatagaagtggattatactttggaataggtgttgctagtttgggtatcttctgttccttaatatttatatttgtccaaagaaatgacggcaaaggtacgaatgctttattagtagatctggaagaagagattattagggaatcaactgaagatgtcatggagaaaaagtga

SEQ ID NO: 6041 - DNA, 1467 bp, Candida albicans
atggtatcttcagactttgaaaatgaaaaacaaccagatgttgttcaagttctaaccgatgaaaaaaatatttccttggacgataaatatgactatgaagaccctaagaactacagtacaaactatgttgatgactacaatcccaaagggttaaggagaccaactccacaagaatctaaatctttgagaagagttattggtaacataagatacagtacatttatgctttgtatttgtgaatttgctgaacgtgcttcatattattctaccactggtattcttactaattatattcaaagaagaattgatcctgactcaccacatggttggggtgcaccaccaccaggaagtccagatgcttcagctggtgctttgggtaaaggtttacaagctgccagtgccttgaccaatcttttaacatttttagcttatgtattccctttaattggtggttatttaggtgatagcacaattggaagatggaaagctattcagtggggggtattttttggatttgttggccatttgtttttcatttttgctagtatcccacaggcaattgaaaatgccaatgctgggttgggattatgtgttattgcaattataactttgtcagcaggactgggattaatgaagcctaacttgttacctcttgttttagatcaataccctgaagaaagagatatggtaaaagtgttaccaacaggtgaactgattattttggatagagagaaaagtttgagtagaatcacaaacgtattttatcttgcaattaatattggtgcctttttgcaaattgctacttcgtattgtgaaagaagagttgggttttggcttgcattctttgttcctatgatattgtacataattgtaccaattttcttatttattgtgaaacctaaacttaagattaagccaccacaaggtcaagtcatgaccaatgtcgtcaagattttatcagttttgttttctggaaatttcatcaagagattgtggaatggaacattttgggatcatgcaagaccttcacatatggaagccagagggactatttactacaatagtaaaaagaaaagtgccattacttggtctgaccaatggatattagatatcaagcaaacatttgattcctgcaaaatttttctttactatattattttcaatttggccgatagtggattaggatcagtagaaacttccttaattggtgctatgaaattagacggagttccaaatgatctttttaataattttaatccattgactattatcattttgattccgatccttgaatacggactctacccattgttgaacaaattcaagattggctttaaaccaatatggagaatctgttttggatttgttgtttgttccttttcacaaattgccgggtttgttttacaaaaacaagtttatgagcaagtatgtaaattatcagaggttttttttacactcattgtatag

SEQ ID NO: 6042 - DNA, 1215 bp, Candida albicans
atgttaagacttctgatacaaagaacatattccaaaacaacaatacctcaaatatcgagaagttgtgtttcattctcttcaattcgtcataataccactacatcttctaccaacactagtagttccaccaccccgatcactatcaagactaactcatccaaatctaaaacaaatggaactttagtagattcaaacaaatttttgagaacaacttatgaatctatagatgattatggtagttataaacataatatattcactcatagattacctgaatcatcagctaaacaatcaccaccattagttgcattacataatcgtttacaattacctaaatcatttaaattagctacattatcacaatgtcttaatttaattactaaaccagaagaatctgatggattagctaataattttggattaaatacattaggtaaatctttattatcatattatgttactgaacatttattaattcattatcctcgattaccgatgaaaatccatcaagctgccgttgattcattaatgggtaatttagcattactggaaattggtaaaacttgggggattgaaattgatgaagttagtaaattggatagatttttaggtcaagaatcagaatttatgaaatttggtagattaagatatctttatgatcaagataaatctgataaattttataataataatggtaattataaaaatgtttccgggatagaagaagttatagatgaacaaggtaaattatcacaacaagatttagcttatgcttctgctgttaaagctataattggtggattatatactcattgtggtgaatcagcggctaaagatttcattaatgatcatattttatcaagaaaaattcctttggatcaaatgtttgaatttaaaagaccaattagtgaattgattagattatgtgataaattagaatttaaacaaccagttagtattagattaattgctgaaaccgggagattatcggctcatccacaatttttggcaggagtatttgttggtaatgataaaattggtgagggaattggatcatctttgaaagaagcacaaattagagcttcaattaattcattattgggttattatttatattcaccaattagtgcaaatggtgaaccaataaaagaaccaagtgattcagtggattataaatttgaaggtatgattggacttggagatgttgctgtttaa

SEQ ID NO: 6043 - DNA, 2625 bp, Candida albicans
atgttgtacagagtatctggattttacaaacgccacacccgaaatttcaccaatattgactatggttactacattagaaattttatccaccatatagcatcaaaaatatatccttatgccaaggttgtgctacccaattttcgggcagctcactatttctacattcttaccttggtcattttggggtcgatattggtgtatccagtaaagacatgtgcatatattgatgttttgtttttcacggcgggggcgtctacgcaagcaggtttgaataccgtcaatgtcaacgacctatccctataccaacaaattgtattgtatttgttggccactttggcgacgccgatatttattcatggctccttgctttttgttagactttactactttgagcgtcattttgataatatcaaagagcgttccttaatggattatagaatgagaaagtctgcaacacttgcaagattgggatctgcaccaacaatgagttcaacaagattaaacactttcaacaaccaagtattgggttttcaagaacgagaggcagagaagggttcgtctttatctcctcagtcatcttcatcacaaacaagccagccggttctgacagcttacaatgatcaaggtgggaatgatatagaacaccatagtgagccttcagacagcgatgatgatgagagtggtaatgggcctgttactttccaggagaagattcattttgaagagccacagagaccaagatctcaacgtcgacacagccgtactgattctggtatcaagttcagtgctttgcctcatccaagaagaaggaagtcgattgaccctgaagatatgtaccgatcgataaacatgttgcaagagcataagaaaaaccaagaggctaaatccaagggaattcagtttttgaacattggttctccggtccgtaggaaatcacgcagttcaaacattgaggcttttccagaggaggatactaatcctctgcgtgatgatgagatcactccagcaacaaatagtgtcggtactggcaataacgacgaggatgaagatgatattttgattatcaaaccaccaatagaaatagagaactcagatggagcaaacccgattttcaccaagaagaagaaacttgcatcacagattcaatttaaagagacccctgggaaagcaaagaaatggattaccacgaaaacgcgcaaacattataacccttggacaagcaagttgaagaaaacattatcaaattcaagtaaaaaagggtctctaagtgttgtgccgacagataccgaggatgacagcgaagatgaagaatatgcatcgatagattctgaaaccagtgatatctcagataacgaacatgctgccgacaacgctgaaggaagcgatgttgatagtgtaggatcatacgaggaagatgaagatgaagatgaacacaatagtgatgacgatgatgatggtgaaggtgaaaggagactaggaaatggcgcatctttaaccaaagctcaatcacatttggtgttgccatcaaaggatgagacgggtggaaagaaatacaccaagaggagcaacacactcgatactccacaacaaaacacaagcgatgggcgcaaaattcgaaagaaagcaccaaagcggaaaaccccaagaacacagagaaatgcatctttcaatcaacattcgaatgtctcaattggtgatggttctatagaaaatgtggacacgaacgattcctaccagagattgtcgcgaacaatgagtggcaattatctatcgtggacgcctactgttggtcggaattctacgtttattaagttgacggacgagcagaaagaggaattaggaggtattgagtatcgggcagttaagttgttgatcaaaattattgttgtctattatgtggggttcaatattatccctggtgtaatgttgctgatatggatatattgtatgcctcactataaaaacttgatgataagcagttccatctcacccgcctggtgggcgtttttcacactgcagtcgtcattcaacgatttggggctcactttaacgtccaattcgatgatgtctttcaaccagaatgcgtttgtacaaatcctttgttcatttttgattgttatcggtaacacggggttcccaatattattgagatttataatctgggtcatgttcaaaacagcaagaccattatctttgtacaaggagtccttggggttcttattagatcatccacgtcgctgttttacgttgttgtttccttctgttcctacttggtggttgttctttatattggtagtattgaatgggtttgacttggtcatattctgtatacttgatctccatgatgacactttcaaaggggttgatatggggtacagggttttgaatggtttgtttcaagcattctgtactagaacagtgggattttcagtaatggatttatcgcagttgcatgcagcgactcaggtgagttacttgatcatgatgtatattctgttttgccccattgctatttccgtgagaagaaccaatgtttatgaagaacagtcgtgggggtatatgccaaggagaatgcagagggtgttgatgagagtgcgccatcaaactatgttgggtcgcatttga

SEQ ID NO: 6044 - DNA, 819 bp, Candida albicans
atgaggcagaaatacatcagagtcaaaataattacagattttgaaaaaaaaaaaccaaaaaaaaaatttagagaatcaagtaacacgaagttgaattatattttgcaagctattcgaagaataccttatttcataaacaccaacatagaaatgactttgaacataacagttttgatatcgggatccggtacaaacttacaagcacttatagatgctcagaaaaacaatcaattgaaaggtcaaattactcaagttatatcgtcatcggaaactgcatatggattaaaaagagctcagcaagcatgcatacctacaaaaactcatgtattgaaaacctactacaagggaaccactaaagatcaaaccgacgtgcgtaagcaacgcagagaacaattcaacgttgagttagctaatttactcatcaatggtcaaattcaaggttcggatgccctgtacacaaagccagatttgattgtttgtgctggatggatgttgattttatcaccaagtgttttacaacctttggagaaggcaggaatcactattattaacttgcatcctgcattacctggtgcattcgacggaacccatgccattgatcgttgctggaaagctggtcaagatggagaaattacaaaaggtggagttatgatccacagagtcattgctgaggtggatagaggcactcctattttggtcaaggagcttgatttgattaaaggtgaatctttagaagaatatgaagacagagtgcataaagtggaacacgtcgccatagttgaagggaccaacattattctcgaggaattgagcaagtaa

SEQ ID NO: 6045 - DNA, 1176 bp, Candida albicans
atggcaaaatctttaccattaaattcaagatctaaaactactgctttaaagcaacctcgtgaattattcagttatgctcgtgatatagatgggaaatatgtttatgatgatcctgaaaattcattatcatattattatttgcctgattcaaccattgatactgggattgatttacaaggtggatactctaaattcaaaaaaatccctgacgaacaaaatttagctgatttcaattcattattaaaagcaattattaaatatgaaacttccgaaggtaaaaagatatcgagtgatataatcactttccgagaaataatgaccaaaatactttcattgccatataatttaactgatccaatagatttatatgttgtaccctttgacggtcaattatttattaaatcagatgacgaactagatatgaaaagaaggaaagaacaagaagttcgaatgaagcagacaaacactgtagaaagatatgattatatgaaacgatgtgaatatgttgggtataaatttgaaacaattgccactattccaaaaccatggagtcaagtatcaagaagtcaaattgaaaataggaataagaaagtcgttaataattacgaacaatatctttctgtgattagaactggtattggtaatgtcaaattggtattagctggggaaattgattgttgttgggattatttacctgatgaacagaataaaaaattgaatcattatgttgaattgaaaactagtcgaatcattgaaaacaattcacaagtggtttcatttgaacaaaaattgtttaaagcatggtgtcaatgttttttaatgggggtcacgaaaatcatttatggatttcgagataataatttaattttaaaaaatgttgagttattcaacactgaagaaatcccaattttaattaaaaataatccattaacaaatgcagcaacagaaaagaaaatcaattgtactaatgcattgaaatggtatggggctgtagttgattggttgaataccacagttgataaaaaagatgaaatcaagagttatcgtttgaaatatgatcctgtaaggaaatcgttcactttaagtgaaaccgatagtgaaactaatgaaaaattaagaaatggtcaattgctcacgccagaatttaccgaatggagacaaagtttgaaaaaatag

SEQ ID NO: 6046 - DNA, 945 bp, Candida albicans
atgggtccatttgggttgggttggttgcgtagaaataccattattgttttgttcaccacttgcatatcctatcctttatcgttaaaccgagatatttcaaaattagcaaaagcatctggatttgctttagttggaatgttcatcattgttgtccttactatttttagagcaccttttgtttcacctactataaagggtgaattgacagtaaaagagtggactgtcaatgccaatattttccaaggaatttcagtcatttcatttgcattagtttgtcatcataacacaatgttcatttatcagtcaatgaaaaacccaagtttagccaagttttccaaattgacacacatatcgtgccttgtttccatgattttttgtatgatcatggccataaatggattaatcaatttcggagacattacaaaggggaacattctcaataatttcaaaagtaatgataattggatcaatattgcccgattttgttttggattgaatatgttaacaactttcccattggaaatatttgttgttcgtgatgttttgaaagagattatattggccaagaaggcaagtgttgatggcagcactgcagacttggagttgagctccaaacagcatttcttcattactagtttcctagtgttcagttcaatgtcagtggcattattcacttgtaatttggggatgattttagaattggttggtgccacgtcggcgtcgcttatggcctatataatacctcctttgtgttatctaaaattgtcatggaatcaagtggactataaactggcaatgcctaaagaaaagaaaaagtttattatattcaaggcaattccaagcatcgcatgtgtattatttggttttgcggttatgtttatttcctcatttatgacaattaaaaatacaagctctgatggcggagaccattgtgtaatagattaa

SEQ ID NO: 6047 - DNA, 2151 bp, Candida albicans
atggcagctcatccttcattatggtatcgagataaagatagtttgagaattgggggtgttgctaggtatactatagaatatacaagattagaccccaccattaaacgtatatatttccgtttgaaaaatatcgaaaaatcgagtatccgagcaatccatctattgagtggtccgttcattttgtattgtcacgtagtgccatgcaattataatccacgtaaaccattccatcctgaaaatgtccagaaaaatacagaagttgtgtttgagaatcaaatcaagccaaaccaagctttcaatgtgtcgcttttgttaaactcaaattccttaaagggaaaggatgataaaggatacgatattttccaatgggaaattgaaattgtttcacaaattgtaatcactaagaaaacagaggttgtctacgatttcatgataggagatgacctacatttcatgaagaaattagggcagagtataatacagcaaactctcaccagtttgggaacaaaaatagatatgaatgaaggaacaaagcccacaattgtggacaaagcgatggatgaaattcataatgattctcataaaatttacaatacacaacttaaagtaagcaaattgactacagatgacatctggtcgaacgaaccaaaagatcccaaaaagccagttcacttagttatcgttacacacggaattttttcaaacttgactgcagatatgttgtatatcaaggatcaattggagcttagagtaaaggaaaatattttggttaggggctatagatataacgctggacgtactgaaagaggggtcaaaaaattggggactaacgttgctaattacattacagatttaattgagaattcactctatcagtatgataagatctcgtttattggccattctttaggaggagtggtacagctatatgccatcaagtacattttgatgactaaagggccagattattttgagagaatgagaatcaaaccagttaattttattggaatggcttccccatttttaggaattttgaatgaaatgaattttttgatatcgtgggtgttggatatgggtacccttggtaagactggtcgggatttaaccttactgaaacgattgcctgcatggagtgatataagcattggagagtccaaaaagagagattcattcaaacctgtcttggaaactctaccagaagatcctttgcaaaaatttttgacacagtttgaacaattggttgtgtatgcaaatgctatgaatgatgggatagtaccattgagaacttccgctttgctatatttagattatgaagcattaggagacgtttctgaattgaaaaagagtaagcacatgcatgttcaccctgaactagaagaagctgaccacaaaatacaagtgaaccgtagtcgtgatactgtactggaagtacccgaagaagcaaatcaaatggttcaggacatacaggacgcagcaaagtctacagataattcccagtcaactgaatcatcagagactatgggcaagaaccatgtcatcagcagatataaagaattcttgaacttgaatttcctggagcataattccaataatcacaaacccaagctaacgaaaagacagagaaaatataaaaattttagcgtaagaggaactgattataatgtgtttaacgatgtcttaccagaagatcactcattccagtcagaggaaactaattcaacccaagattctcaaactatagtcgtcccaccaagagcatctgctatagaatctgcaatcaatacacttatatgccccatcccttccaatgagtttttgataaatcccgagctgagacagcatgttattttccatgacaagtactatcaattcaataaatcatcccaagaagaaggtaacctcaacaaacatctgaaggtagaatggtttgcatcagttttgttgagatatcacagtaaatggaaattagagaagcagaaacagatagctgataaatatcataatgcgtgtggctggagaaaagttttggttaatctacctctagatgcacataataacatcgtagttcggagaaggtttgctaatggatatggttggggtgttgtagatcacttgtgtgatttatttagagtttcagaaaacaaattgtaa

SEQ ID NO: 6048 - DNA, 1077 bp, Candida albicans
atgaagttttctcaagttgccactactgctgccatttttgctggtttaaccactgctgaaatcgcctatgtcacccagactcgtggtgttactgttggtgaaactgccaccgttgctacaactgttaccgttggtgcaactgtcacaggtggtggccaaggtcaagatcaagttcaacaatcagctgctccagaagctgatgatatccaacaatcagctgttccagaagctgatgatatccaacaatcagttgttccagaagctgaacccactgccgatgctgatggtggtaatggtattgcaattaccgaagtctttaccactaccattatgggtcaagagattgtttattccggtgtttattacagttatggtgaagaacatacctatggagacgttcaagttcaaaccctcactattgggggtggcggcttcccttcagatgaccaatatcctacaactgaagtttctgctgaggctagtccatctgctgttactacttcttctgctgttgctactcctgacgccaaagtcccagactctactaaagacgcttctcaacccgctgctactacagctagtggctcctcttctggtagtaatgactttagtggtgttaaagataccaaatttgctcaacaaattttggatgctcacaaccaaaaacgtgctagacatggtgttccagatttgacttgggatgctactgtttaccaatatgctcaaaaatttgctgatcaatacagttgttctggtaacttgcaacactctggtggtaaatatggtgaaaacttggctgttggttatgctgatggtgctgctgctcttcaagcttggtacgaagaagctggtaaggacggattaagctacagttacggttcttcttctgtatacaaccatttcactcaagttgtctggaaatcaaccaccaaacttggttgtgcttacaaggattgtcgtgctcaaaactggggattatacgttgtttgttcctacgacccagctggtaacgttatgggtactgatccaaagactggtaaatcttatatggctgaaaatgtcttgagaccacaataa

SEQ ID NO: 6049 - DNA, 2373 bp, Candida albicans
atggagttatctgaaggtgagttatcacatacatcatcttcgtcatcgtttgtccctgttgatcagcgtcaattacaagatgcaattcaaattatcgatgagaataaacatttcaacactggtattctcgactatatcaacaaaacgtcacccgctgatgtaggcaacaactaccacattatttctgtttttgggtcacagtcgaccgggaagtctacgttgttgaacaggttgttcaatacgaattttgatgttatggacgagctgaaccgtcaacaaactaccaaggggatatggttggcgtactcgccagtggtgtcgacgactttggggcacactacgagcaagtccaatattcttgttatggacgtcgaaggtactgatgggagagaaagaggagaggaccaggactttgagcgtaaagcggcgttgtttgcgttgtccacgtcagaagttttgattatcaatatttgggagacgcaagtggggttgtatcagggtgcgaatatgggattgttgaaaactgtatttgaggtcaatttatcgttgtttgggaagagcaaattggaaacacataatgaccataaagtgttgttgttgattgttattagggaccatgttggtgttacgcctgttgagagcttggccaagacgtttacgctggatttgcagaacatgtggagcagccttgccaagccagcagagttggagcatttgcagtttgccgactttttcgatgttactttccatgcgcttaaccataaggttcttcaaccaaaagagtttggcgagggtattaacagacttgatgataggttagtggttagcaacgaattgtttaagcccgagtaccaccacgatgttccgattgatgggtggaccatgtatgctgaacgatgctgggagcagattgaaaccaacaaggacttggatttgccaacacagcagatattggttgctcagttcaagtgtgacgagattgttgagagtgtgttccaagagtttttggcaaagtaccagcaccactttaaggaggtggacgctgctcctgattttgaggagttgggtgcgttgtttgctgatttgaggcaagacgcgtttgaggattatgatgcttctgcgtctagatacaacaaggcagtgtatgaacaaaagaggaaaaaattgagatggttgatcaacgacaagctcaaggaggtgtttgatgtgcatgccaagaacttgtgtaatactttgttggagaagtttgagaaggatctagttgcattaaagggtaaggattttgctgtgaatgtcaagacattatctaccaagttggttgaggatgtcaatttccaagtcagtttgatgtcgttgcaaggtgatctttcgttggatgagataattttggcgttgaccaaggacattgatgctattgttgctaagcagcaggttatcgagttgaactcgattgttaacaagtcggtgaaaaagttatcggccagtttgtccaagtcgatccagtttgagttgggcgatccaaacgaggaaacctgggataatgttttgcagcagtttaagggtgtgtacgagaagtttggtggtgattttgggcttggcacgtcatccacgcagaaccagcaggccattgaaaagttcaagttcaaatcgtggtgccagttttatgatgtcacacacaagttgatttcgagagaaaagttgttggcgttgctacaagataggtttgacgacaagtttaggtacgacgagaatgggttaccgaaattgtaccttaacgagcaagatttggaaaagacatttgcggtggccaagcagcatgcgttgcaggtgttgccgatcttgacttttgccaagttggctgatggttcggagattgttcccgactacgatatttttgactcaaagttaagagaacagtttttagggggctacgacgatagtgatgatgaagaagatcactgttttgccgagatcattaccgagcaagagaagctggaagttttggctaagttcaagaaggaagttgatgccaagtacattgagacaaaacgttcgattgttcagcatatcacgcaaatcccatactatatttatttgattatattggtgcttgggtggaatgagtttatggcgattatccgcaacccattatttttctcgttgagtattgtgttgggtgcgacggtgtacgttttgtactatttggggttgttgagaccggctttagtggtggcacaacgaaccatggatgaggtcattgttatggccaaaacaaagttgcgggaggtattgattgatgaccatgaggttacagggcgccagttgaataagatggccggtagcaaagagaatattgagctagacgatatgtaa

SEQ ID NO: 6050 - DNA, 1188 bp, Candida albicans
atgagccaaaatgccgatgaatatgaagctttaacggccactttactgtcgttttacaattttttcaggcaccaattcgagcacattatcaaaccaagactaataaaatttcgagccatgaccgagaaagaaagagctttgcttccatggtacgaagcgcacacaggggagttaaaacagtgtatcgaagtaaatcgtggatttacggaattactatctacaagcattgcaaatgactggggtgttgctggaacatctctagattggcatccagctggccctcgagagtttgagataacctccacgacgttattgcaattgatgagagagtggagtgacgagggccaagctgaaagagacgttgcattcactcgaatcataagcgagttggaagagctttatcctgatgagccgtcgcgacaatcaatcagaatattaaaccctggctgtggcttgggtcgattggttatggagttggtgataagaggattttggacacaaggaaacgagatcagctaccacatgctattggcatcaaattttatattgaatcacagccagtttcctcacagccattcgatatttccgtttttatcgagatcgtcgcatttggtaaagcgaaagtatcaaacaaggggcatcacaatccccgatgtggcaccgtttgcggtcctctcagaattgaaggagaaaactcccagtattgcatacgaagaattgatgtcaataactgccggctcgtttcttgaattatacggtccaaataaaccgagcgacactttgaatgacccggctgccattgagttgaagaattcgagcaaagatagctttgacgtcgttgttacgaatttttttttagacacagcaagcaatatcatcgagtatgtgagagcaatcaaccacgttttgaaaaatggtggcagatggataaatttcggtccattgttgtggcattttgagggtgactacaatgtcagctacattaatagagaagataatgtctctataccagatatcaaaaaagggttagagttatctcgcgaagacttgcttgagttaatcaagaatatgggctttgactttgtgaaacatgagtctgacatagaaagcacatattgcaaggacataaagctgttgggctcatttgttttcaagtgtgaatattgggtgtgtattaaagtgagataa

SEQ ID NO: 6051 - DNA, 1935 bp, Candida albicans
atgtctttacttgcgagagtgttgcagatatcttcagataaacatctgacgaagaaatcatcatcagcactgacaacaataactccggtgagttccagaacttcgcaggtatcgaagagttcatcctccccaccacaatcggtgaatcaatcacctcattctgcatacacattatccatcaacattgaatctccacctatagtattatacggagctcctggtgattgcacagggtcgataatatcaggaatattgaaactaacaaatgaagatagtattgagttggaaaatgtcactctatcacttgttcaaaccatgcaatatacaaaaccattcactttacccaactcttcttctgtgtcaggctgtaagaagtgcaacacacgtgttacagacttggcaagatgggatatattgacggtagcaacgagtttcccaccaggtgaacatgcatatcccttttctcatctcttacctgggtcattaccaccgacctcaaaattggggtcattgcattcacaatcatttataaagtatgagcttgtggcagttgtaacagacaccgatgggaaagtgaagaaattagtgataccagtgaacattgctcgactgattatcagaggcccagatagaaattcggtcaggatcttcccacctacagaagtaacaacaaatgctgttttacccaatgttatctatccaaaggcgacattccccatagaacttaaaatagacaacatagtgagtagttcacagcaaagacgttggaggatgagaaagttgagttggagaatcgaagaaaatacaaaagtgagggcatacacttgtgaaaagcatattcccaaattacaaatggttgaaaaagcatatagtaaatcttccaaagcaaatttgccccacacaaccggtaccaaaacctcaagcatgcaccatagtacagtgttgactaatatctcattgatgaccagtccatcaaatttggagtcacaaccacaaaatttagatgatggcatccctgacagtgagccactaaatgatgctgaacatgacattgaagaaacaattagaagcgggccttcacacgcacacgagaattttatcgaggatttcgttaatccgaatcaaagaaacagcactacacatgaactggatttatcagttcagccttcgatccaaaccccacaacctagagacactgataaacatttgtatttagaagaaacaagaacagttagttatggagatatcaaatcgggttggaaatcggatttctcaggacggggaaaaattgagttggtggcaaatatcaatacaaccaattgttccaccgggatgatcaatcatataaatatgttaagtagcgaagatgcacctattgttttggatactaaaaaaggtgcaaatttttcctgcgatattgatgatccaacattgggagtatttgttagccatacaatgattgtcgaagtggtgattgcagaagaattggttcacaatttggagaggaaaagagcaggttcagggacatctaaggacttggctccagttcaatccagatccagtgttgtctcaaacgatggtggtaaatcctcatctagtggtcctgttcaaatgggtgtgcctactggggccgcaagagtattgcgtatgcagtttaaattgccagttaccgaaagatcaggattgggaattgcgtgggatgatgaagtacctccaacctatgaggacgtgagcactttaagtcctcctacatacaatgatcatacatcatcatcatttacgataactcctgttatgtctgatagtgagagaccaaccccaaatgttctttatggtagaggagaaactcctgtaataggaaactttggattggatctatcacacgtaaatagtattgacgctatggtcgacaacattcaagaattttcgttataa

SEQ ID NO: 6052 - DNA, 1527 bp, Candida albicans
atggtagtcgatactacgtattacgatcttttaaacattgaaaccagtgccacatcattagaaatcaaaaaggcgtatcgtaaagctgcgattaagttacatccagataagaatcccaatgatcctgatgccgccgctaaattccaagaagttggtgaagcatatcaagtattgagtgatgaaacgttaagagcaaaatatgataaatatggtaaacaggaatcaatccctcaagaagggtttgaagatcccgctgaatttttttccatgatttttggtggtgaagcatttaaagattggattggagaattgagtttgttactggaattatcaaaatcagctgaactatctggatattctgataatgcagacaagaaaaaggatactaagactgctggaactgggtctgatgagtcaaaggaatccaatgaatcgaagaaacaaaagcttgacactacagagaatggccacaaatcatcaactgaacctcgcttattagcaaatggtgaaaatactcctggaaaccagttaactgaaaaggaactcgaagagaaaaaacgtaaggaggaattggaaaagtttgaagaagagtgtcgagtgaaaaaaatcgaaactagaaatgaattgagtaaaaaattgattaacaaattatcgttattcactgaaactgatatgaaagatgatgtagttgagtctttccaaactaaaatcaaatatgaagctgaatctttgaaaatggaaagttttggattagaaattttacacactattggacatatttataaaaccaagtcaaaaatatttttgaagaaccagacatttttcggttggggtgggttttggtggtcaatgaaggaaaaagggggtgttgtgaaagatacgtttaagacagtttcggctgcattagatgcacaaagaacaatggaagagtatacacaaatgcaacaggacaatgagtatcatgctaaaaaggaagcagaagaggaagaagccaagaaacaagctaacgaagaagtatctaaattggagaaagagttggaagaggtgaaaaaggaacaacaacaacaaaagtctcaagataagccggctgctgaaactgaaggtagttcgactggtgattctcaactcaaagaaggacaagaagcagaaggaagtgtcagcaaatttgaaactaaagaacctgccaaacacactgctgaagaattggctgaaatggaaaaatatcttatgggtaaagtgttagcagcagcatggaatggatcaaaattcgagattcaaggtactgtccgtgctgtttgtgataacatattggaggacaaagatgtgtcacttgagactagagttgctcgtgccaaagcattaagactaataggtgatgtttttgtttctatgacacgtacagaagctgaagctgaagaagcaagggtttttgaagaattggtcgcagaagcaagtaaaaaaagagaaaagaaaaagacaccaactgaagcagagcaacaacaagaacgtgctgaacacgcttcttga

SEQ ID NO: 6053 - DNA, 771 bp, Candida albicans
atgacagaggttttcaatagaggagccaaattatttgacgataataatcaacgtgattataatcatgccactgattccgagtataaacggttaagaagtgaggctgatagattatttcaaaaaagacaacaattaagtcaacaatcacaaaatgcctataaacaaggtgatggtcaaaaagcccatgaattaagtgaagaactgaaacgtgttttagctcaagctgaagaatgtaatcgtaaagctgccgaatatgttttccgtgaaaataatgaagatagtggacccgatgaaattgatttacatggattatacgtcaaagaagccgaatggattttggaaagaagaatttattatgccgtcaagacaaatcaattgcatttgaatgttattgttggtaaaggattacattcagccaatggagttgccaaaatcaaaccggctgttgatgaattgtgtgatcaagttgggttaaaccattacattgataaaaagaatagtggagtgttagttattgatttgaaaggtgttaatcttgatagacttccaagttcatgggctcaaggaacaaataatgtggcaccacctcaacaagcttatcacggaactggccaaccacaatatcaacaacaacaacaacatcaaggacaacaatcacataaccaatatcaacaacaacaacatcaaggtggccaacaagacattaaaactggtaatgatttggttgatatggttcttaagattgtttgtggttgtctcaagagtaagtga

SEQ ID NO: 6054 - DNA, 897 bp, Candida albicans
atggatttagtcaatcatttaccagaccgtttgttatttgctgttcctaaaaagggcagattatacgaaaaatgctgtaacttattgagtggtgccgatatacagtttagaagatctaatagattagatatagcactttctacaaacttgccaattgcattaatcttcttgcctgcagctgatatcccagttttcgttggagaaggtaattgtgacttgggtataactgggttagaccaaatcaaagaagctgaacaattcgacaacatcgaggacttgttggatttgaaatttggttcatgcaaattgcagatccaagttccagcagatggcgagtacgaaaagccagaacagcttgttggaaagaaaattgtgtcttcatttacaaaattgagtaccgactatttcaaacaattgtcagacaaacctactaatatcagatatgtcggtggttccgttgaggcttcttgtgccttgggtgttgctgatgctattgtcgatttggttgaaagtggtgaaactatgaaagcagctgggttaaaggccatagaaaccatattggagacttcggctcatttgatttcgtcaaagaaaagtaaattcccagaaatggtcaatataatcgtccaaagacttcaaggtgttttagctgcccaggaatatgtcttgtgtaactacaatgccccaaaatccatccaagcaaaatgtttaaccattactccaggcagaagggccgctactgtctctactttggacaaacacagcgacgacgaagaggactgggttgccatctcatccatggttaatagaaaggaaatcggtaatgtaatggacgaattgaagaaagctggtgcaaccgatatattggtactcgagatatcaaattgtagagtttaa

SEQ ID NO: 6055 - DNA, 1158 bp, Candida albicans
atggcaccagttgcagatactactaaatacgacgcttctcaatttcaaaaagctcacgttggtaaaaccagcaaaggctcatttactgtgagtgatcacaacaaatctttagctttatacccggaatttttgccaacatggaacccaaaccaaaagttcccatcttataagtttgaacagtaccatgataaagggcatgctgctgatcctttgttgtccaatttgtttcctgctggtggggattacaaggtcaagaggttgagccccaaattaggttctgtgataactggtattcagctttcacagttgtcagatgctgcgaaaaacgacctttctcgttttgttgctgaaagaggtgtggttgtgttcagagaccaagattttaaccaaggtgggccccaggctgctgttgagtttgcccaatactttgggccattgtacaagcatgccacgagtggctccccagaagggttccctgaattgcatgtttgctttcgtggtgcatcacaggatgaaattgatagtgttttttctgacagaacgaattccatctcatggcattctgattgctcatattcgttgaatgcattgcagttgactttgttctcatgcttgcaattgccagactccggtggtgatacattatttgctaattcggttgaagcatataaccgtttaagtcctgccatgaaagaaagattggaaggattgcatgtcttgcattcatcagttgagcaggcggcaaacaataaactggctggtggaataactagaagagaaccggaagctaatatccatccgcttgttagagttaacccagtcaccaaacaaaaacacttgtatttgaacaaagagtttggaagacgtattgttgaattaaaggaagatgaactggactatttgttgtcattcttgtatgaccatatagagaaggctcaagatttgcaaataagagttacgtgggaggagaatactgttgttttatggaacaactcaaccacaattcactctccatgtgttgactttgatgagcctgaaatccgccacgcttatagaataagtgtcatgggcgaacgaccagttggcgatttaaagtacttgaatgatgaaaattatttacaagaaaagtacaatgagcttggaattcaaaaaagttaa

SEQ ID NO: 6056 - DNA, 2196 bp, Candida albicans
atgtctaacaatcctcatccccaggatgatgggtcacagctatatgataactttgaaatatcacctccttctattgtaatcaggaaagccgatactgatcaatctttaaataaaattatgctcaatcaagaatcacaagatatcaacaactactatactgaaaatgttaagaacgacaacaaccctaataatagctatcaagactacacattttcgggaaattcatcaaaccaacaacatcaacaacaacaacaacaacatttgtatgaggatttgcctactcaatttcattattccaataattcattttttgaacctccaccggcacctactgtggaattaactgatgacccattacctaatttcaattaccctccttcaaacatatatattaatgataacgcctccgacatatcattaaacacaaaggacttgcctcagtttaccactaacgaatttctttctccaacatcacaacttagtacgcccttttcacctggtcattattcacaactgctgcaagatttcttacaagtgaatcacactaatggtagtggtaacaacaacaataacaacaacaataacaatttattaaatcctcgttcaccatcacaatattcatcccattcattatactcagataattcatcacaacctgcatctccatttttagatgcagcttcccatgttagtaacaatagttttattcctccagtgatacctactgcattatcagatgttggatcacagaaccttgacccctctcataacttggggctatcagcaaaccaacactttgattctgttaacgaatttttaagcacaggagagatacaacttggacaatctgtcagttcaacaaatttaccttctatggaggaagatagtataaaatggggtggtggtaatggacaagaagcctatactagtctagcgatgatggaacaaagagcaagtgcagataatagtggtatgagattggcaacccatcaattttctgaaactcaaatcaaacaagaagatcaacaaactaatatgaatcaccaatatactttttcgaatccacaaatgaattttgattttgatattacagttactcctccaccacaacaactagaagtgaaaccttttggcaacgacaaggatatgaataatagtagtggcaccaccaataataataataataatagtcaatttgatattgtgagtactgcagctacgaacaattctaatcaattattgacagaaaataatttatccaattacaatcaattacaacggacagagcaaggtaatgataacgatagtttacaaatccatcgagatgccacaggtataatcatttccattaatcaagctcctgaagaaattgctgctaaaacaccatcattatttagtaactcttcagcaaattcatcaattcataattcaccaagaagtgatattgataataaaagtggtcaatattataataatggtggcgatggtaatagtctcgtaccgaactcacaattgctaccttcatcaccaaattccaacaatgataattatggtggtggtggtagtagtaacgatgagaataatctattaaatccagaagaatttcaatcggtgaaacgaggacgacggaaaagtcatgcatcaagaacttcgaccaatccaaatagtttatcaccacgatcaagatcaaggtcaagatcaagtgccaaatcttcaaatgatgctgttatatcagataatgatgaatcagatgatgtattacaatcacgagagaaaatgttagaattggcattaccttcactgtcatcgaaacgaacccaaaaacatccaagtttatatgcttgccatttatgtgataaacgttttactcgaccttataatttaaaatcacatattcgaactcatactcaagaaaaaccatttatatgtagtaaatgtggtaaactgtttgctagatctcatgacaaaaaacgtcatgaattattacatcaaggtattaaaaattttaaatgtgaaggttatttacaagatggtactagatggggatgtggtaaactgtttgctcgtgctgatgccttacgacgacattttcaaactgaagcagggaaacaatgtgttaaacgattattattagaagaacaagcaaattcaagtggtaaaccacttgctactagtagtggtgttgaaattacttag

SEQ ID NO: 6057 - DNA, 3708 bp, Candida albicans
atgactataacatttattccaggagaagtcaacaagagtaattattctgttgcgcattccaattggaagaaccaccacattatagcatatggttccggtaacaacttgataattaccggtggcacggttcagccaactaacaaaaacccaaatccatttaatgtagacaagagcttgcaaacaatatatttggatagagatccactggctattgatatcaaccctgaaaacggatacatactagtttctattgagtccaaaattctcgtctataaaccaatgaacgagtatatgaaaatacctaaatggcaactgagtattgaaatagatgtcaacgagtctacaataaactgtattaagtgggcatcagaggaaaatgaaattgtcgtaggtacggattcgggattatacttgttttatttgtacgaggaatatggggagttgaaatatagaaaacgatggcaagcaaatcaagttaaccctgttactgaaatattggtaacccctaattcaaaaatgataatgacgaaaagtggactgtttgatcggttaattaaagtctggacaagaatcagctatggtgatgaaaacactttgtttgaagtaacctatttaccacatccacaggggacgtttgtgatcgattatcatttgaagaaacaaatcactgaagaagacaaaaagaacgaaatagatgcatccatggctaacatcaaaaatattcgagactatttaaacaatgcgaccgatgaaggtgaagttatctattcgttttgttcggactacaaattcagagtgtgggcttcatgtgaacatagtggtcataaccagataaataattgggctacacttgatttgaaggaagttttcctgaagataagtactgttattgtgatagagaattaccatttacgtgagacattgatccctgccttgaagaatagtgattgcactttattcaacggtttagatattaatgatttagatttattgtttgttgtatcagatactgcagaagtaaagatttatgctatcacaaatatctcacagtgtccaccaaccaaaattctttttacaccaatatcagggaactaccattttggtaagaatgaatatccattgatcaacacacaagtaaaaacagagaaaatatcaagcagttatattgaatcggaagagtttatcactaccgtattgaaaccgctattagtgaaagaaatttgcatattaaatgaaagagtgccctttttaacctttttgctacatgacagagttaaaaacacattgagatttaatattatgaatatcgaaaagttagcacgtggctccaaacttgaatctgtattgataaacaaataccaaggccacaccaaatcaattagaaagttagtcaagtcaaactcgtctttctcacagaacaatgtgttgctttccattctgaatttccctcaacataattatatttgggaaccaatgttgcttcaaactaataccatgtcggtgactaaaagattccagataaatgttgagtcaggtatagtgaatgcagtgataatcaatgatgtagagccaccagttgattggaaacgaagacacattgttgttaccacaggcaggaacaacgaaattagtgtttgggattgtaatggctctactaatgatgatcaacccgcagatttaattaccaaggttaaaactggggttgagaaagatccattggtgtttgttttaaccgagtatcctgataatactcaagcagaaagaaagtattgtgttgtggcattgtatgcccatgatcaaataaaatcatggaaactttccttacattataaacagaataagattactgatatattatttgatgaagaaagcgtagcttcgcttcctcaagaggaagagatttatcaagccactgccgtggatgcgtttgtctccgaggcaaacaaaagtttaattgcagtgatttccaaaaatggattgctaaagagctattcgttaaattttgacgagtctattagatggaaaaaagtcagtgaacttgaaacaaatgtttccgctgctagcaagattcatggttcaactgttattaacaaatttgctgttgtggattctactggttataaattgtcaatatgggatgtcatgcagggggtgttggaatatgaagaaaccttcccagaatcaaatggtccagttacggatttggactggacgtttcttagtgcatcaaagatgaaactgacctcaaatgctcttttatctgttggattcagtcgttttgtattattgtacactcagttacgttatgattatacaaacaaaattccagcatatgctacattgaagaagattgacatttccgattttacatcacatgaaattggagacctgatatggctagatggaggctacttaatcattggtgccggtaatcaatttttcattgatgataggtgggtgaaattagggtcaagtgctatcgacagtaccatacgtcaattgatgagtgggtacacggacgacgatgaagaaatggtatttgatatttcttatttagttagagttcttaatggtccattaccaattttccatccacaatttgtgatacaagctttgtttattatgcaatttactgcggtgaagaaaatacttgtacaattattccaagtcattcgaagaggagatgttatcacatgggatttgaacactgatgttgagaacttatttcgtaatgatgaaatctaccagcctaaacgaagaatgtcattaactttggatacattcactgagtttaatgatgaggtggctgatttattgattgagagacttatgaaaatatccttacctttgttgacccgacaccagcaatcaactttgatttccacaattgttatagttaaagattttacaaaggatatgttggtagaattggatcctaatggaatcagatatttaattctgttgaaattatcgagtactgcgactgccacatcaacatcttctgcaaccacaaagaaacgattagcccaaatacaatgggccatgatgtgtaagactcctgacattctattagaacatgttactaagcattatggaggtaaaattaaatggaaggaaatgaaagatagtggtatgccattttgggttgaaaaaaattcattcaccaaactatttgaaaaaatggctgctttggagttcaaggatgcaccattgggtagaatatgtttgtattatcttctgttgaagaagaaagatattttgattagattgatcaaacataaagacgataaagaaaagaataaaattattggctttatgcaaaaagattttacgcaagcttctaatagatcttcagcattgaaaaatgcttatgtgttattagggttgcatcgatatttggatgctgcatactttttcttattagcagatgctcctaaagattgctgcagaatacttgcagataaagttgattctgatcttgcagttgccgttgctaaagtgtatggagttgaagatatagctgaaaatcaattactgatttcaaacatggattatttacacgatccaattcttttgttgaatagtgataacttttacaaatcagagttatcggagacgcttattagaatttgcatgatttacactagaatgggttgtgattatattgccttagagttattgaaaaattggaagtttgctgataagtag

SEQ ID NO: 6058 - DNA, 702 bp, Candida albicans
atgtttacggcgacgaagacggcaaccaccacaaccacatctatttgtcggttattttctacctccactaaaacattatctaatgttggtaaaaaacccatcagattatatgaaggagtgaattattccattgaatcgatcccagtagaattttgtaaaaaattcactaaacgaaacaaaacatttattttagataggcaaatcattactagtggaccattaggtaaattaagagtagaaatccctgaattcatcaatatttcagaaaacaacaccaatgaaaatgataaatcaatcattgtatctgtgaaaaaacccgaaaataagattcaacgatcattatggggtacatatagatcaattttatataataatatcattggtatcactgaaggtcatttatcaattgttaaatttgttggtactggttatcgagccattttagaaaaagatccacaaactggtgaggatataattagtttaaaaattggtttaccttttacaccaaaattgaaaataccaaaagggttaaaagtttcatcacctaatccagcaagattggtcattgaaggttctgataaacaacaagttaaactatttgcagcatttattagagaacataaaaaacctgaaccatataaagggaaaggtatatttgttgatgatgaaaagattgtgttgaaacaaagaaaagttaaataa

SEQ ID NO: 6059 - DNA, 1707 bp, Candida albicans
atggatagcaaaactgttggtattttaggaggtggccaattaggtcgtatgattgttgaagcagcacatagattgaatatcaagaccgtaattttggacgcagccaaatcaccagctaaacagatcaatgctctagacgatcacgttgatggatcgttcacaaactatgattcgattgtgaaattagctgaaaaggcagacgtattaactgttgaaatcgaacatgttgatgttgatgctttaatcaaagttcaagagaaattccctaaagttgaaatatatccattacctgaaaccataagattgattcaagataaatatttacagaaaaatcatttaatcaaacacgatgttgcagttacagaatctgttgcagttgaaaccaacacagtcgatgacttgttacacattggggaaaagtttggatacccttatatgttaaaatcgagaactttggcgtatgatggtagaggtaactttgttgtcaaagacaagtcatactgtgagaaagctttagaatttttaaaagaccgtccattatatgctgaaaaatggtgtcctttcaccaaagaattggctgtgatggttgtcagatcattagaaggggaagtctttgcttacccaactgttgaaactattcatgaaaacaatatttgtcatttagtgtatgctcctgccaggatcccagatactttggccaaaaaggcatctatattagccaaaaatgcagttaagtcattcctcgggtgtggtattttcggtgttgaaatgttcttgttggaaaacaacgaattattgatcaatgaaattgcaccaagacctcacaactctggtcattataccattgatgcatgtgtcacttcacaatttgaagctcatgttcgtgctgtcacaggattacctatgccaaaggggttcactgaattctccacttccatcaccaatgctattatgttgaatgttttgggtgataaggcaactccaaataaagaattggagatttgtcgccgtgctttggaaactccacatgcgtcagtgtatctttatggtaaaactactagaccagagcgaaagatgggtcatatcaatgttgtcacatcttccatgcaagatgccgagagtagattaagttatatattgggtgataccactgaaattcctaaatctttagctaccgacaaggaatctccattggtgggaataataatgggttccgattcggatctaccagttatggcagttggtgctcgtattttgaaacaatttggtgtgccatttgaactcacaatcgtaagtgcacacagaactcctcatagaatgtctgagtatgctattgaagcaccaaagcgtggcttgaaatgtatcattgctggtgcaggtggtgctgctcatttgccaggtatggtggcggccatgaccccattgcctgtcattggtgttccagttaagggatctacattagatggggttgattcgttacactctatagtacagatgccaagaggtattcctgttgcaactgttgctattaacaatagtactaatgctgcattgttggcaatcagaatattaggcgcctatgactcaaaatggttgactgagatgaaccaatatatgttgaacatggaaactgaagtattaggtaaagcagaaactttagaagaaattggatatgaagactatttaactgataaattgaaaaaatag

SEQ ID NO: 6060 - DNA, 894 bp, Candida albicans
atgtctcagcagaaatatgcattgattactggtgcttcgtcgggtattggatatgctttggccaaagaattttctttacgtggatacaaagttattggatgttcccctaaactggttttgcatttgcaaaagccattagaggacgagtatggtttgatttccattgcttgtgacatcactaatttggaagatattaaaagagtcaaagagcttgttgtgaaagaaacaggtgggtatttagacgtattgtacaataatgccggtatcgctattggtcaacctgctattgagatccctgaagataagttgaattggatattccaagttaatgtcattggacatattaacatgacaaagcattttgcgcctttggttatcaagtctaaagggtccattattttcacaagttcagttgctgcaagggttcctttgtcgtggatttctgcttacagcgcaaccaaagcagcaattgatgcgtatgccaagacattgcatggtgaaatggagccatttggagttaaagttcatagtgtgattaccggaggtgttcaaacacaaattggaggcgaagacaataatatcgaagaaatgaaaaatcaatttgccgattcgccatacaatgtggatggaatagtagaaagtggtattgcttctcaaaaaatggcagcggatttgggtatccctccacagaagtatgcgaaaaatatggttggccaaataactaaaaagtccagcaagtttaacctttacggaggatcgaattcctatcttttgcatattcttggtctcttttatccattctggttggttgaatacattatgcaatttactttcaaacaattaaagccctttgctcttattagaaagaaatatgctggtaaaaagaatagataa

SEQ ID NO: 6061 - DNA, 1545 bp, Candida albicans
atgataacaacaacatctatatcgtcggtgatattgacgatcctcaaaccccttgtatttatatatcaattcatttatcgagtttattggtcaggattaaatcaacgtaatatattacaattgattctaaatttttgtattaatttcagtccagttttcatttggttattaatatttaaaaatgctggattgattcctcatgaaatacgtcctaaaattcatgtcaaattagcatatcatttggaccaatacatttttgaaactataattggtggcatagttaatattttgggattagcatctctggcttggttattatatcgttttgtttatcaactgaaatcgagtaataacaatagcaacagaaacaaccatcaccaaagtcaaatttctggtgagtaccctcctagcaataccaatgacatttattcattgtacaagataccacaaaattatgaattggatattgacaacgatagtagtagtagtaatagcagcaataatagtgatattgaattagaatcatttcctaaagaattgttgaaaccttcttataatcaattaccaccaataaatttccaagacaatgacgatcaaatacaagactcacaactagataacaatagggtccattatggcaattcagagaatactcgatttgcaccaatggtatttatcccacaattaactctggttgaagttggtcaaatggcacaatcaatcaataataaaattcttaatcatattcaaccaaaaaattcaaattctgggttcaattataattattcccccatcaattcatgggatttttgtccatcattattattagccaccagttggtttttattaaattttgttcattatttacgtgaaccaatacgattatggcaagattatttagcatggacaagttatgttttaggtcatatcactgtgcccattatcactgctgtatggttatatgttttccatgctcctggttcacttaaagcatacagttttgcccttggattacaaaatatttgtggagttttaactcatttactattccccaatgctgcaccttggtttattcatatgaatggagagaatgctaatgctgattatgatactccaggttatgccgctggattaattcgagtggatatagcattgggtactcatttaacatctaatggatttcatgcttcccccattgtatttggtgcattaccttcattacattctgctatggcagtaatgacatttttctttgttggatattattcaagatggtattttattaaatttttggcatttatgtttgttatgattcaatggtgggcaacaatatatttggatcatcattggagattagatttattggcaggattgatttatgcttgtatttggtttacgattatttataaattggttattaaatatcaacaagaaagatttataatggctagattgaaatatcaatttaataatggtggtagtaccatgggaatgagagtgtttagaaatactaaaattcaatggtttttcgatccccttagttaa

SEQ ID NO: 6062 - DNA, 1101 bp, Candida albicans
atggctacatttgctccacatattagtaagattaccaaatcttcaaccaaattcaattatggtagaattgcaaagacatttcttggggtagctggttctgccgctattgccacttacttctataacaatggtaatccattcaataacaacaacaataataataacaacaatgggggttctaaaaatgctgctaaggcattatttggagccagtgctggtgccaatgtcaaaattgctaaagtccctgaaggtaaaagtgctagtgattatcaaaaagtttataatgacattgctaccaagatttctgaaaatttagaatttgatgagaatgccggttattatggtcaattgttaagattggcatggcatacatcaggtacttatgataaatctgataattcgggtggatcatatggtggtacaatgatttttgctccagaagaatttgatccagaaaatgctggattacaagttggtcgtgaatttttaatggaatttttagtgaaatatccatggatttcaagaggtgatttatggactttaggaggtgttgctgctgtacaagaatccggtggtccaaaaattgaatggagaccaggtagagttgatgacaatactgcatctaaagtcccaccaaatggtagattacccgatgcttcaaaagatggtaaatatgttaaagatttgtttgctagaatgggatttaatgaaagagaaaccgttgccttacttggtgctcatgttttaggtagatgtcataaacataattccggatatgatggtccatggggtccatcatttaatcaatttactaatgttttttacaccacattattaggtgattggcacgttaaaaaatgggatggtaaaaaacaatacgaagatgatgaaactggtgaatttatgatgttaccaactgatatggctttgaaagaagaactgtattttttgaaatatgtcaagatgtatgctgatgatcaagatttgtttttcaaagattttgctaaagcattttctaaattgatttcaaatggtatcaaatatcctgctgatagtaaaccaatattgttcaaaacattagatgaacaagatgaagaataa

SEQ ID NO: 6063 - DNA, 1167 bp, Candida albicans
atgactgataaaactaattttcctactacagtatttgtatctggtgcttctggattcattgctcaagaattaatcaaacaattgataataaaaggatataatgttataggatcagtaagatccaccactaaaggagaatcaattaaatccaatttaacatcctcatcaaccacacaatcattgaatagtgatttgtttaattatacaattattaaagatatttcatcaccaggagcatttgataatgtattaaaacaatatcccgaaattgagatttttttacatacagcatcaccatttcattttaaagcaggaaatattgaacaagaattattaattccagcaattaatggtactaaaaatgccttattggcaattaaacaatttggtcataaaattaaacatgtagtgattacttcatcagtagttgccgttggaaaatttgggaaatttcctcgtaccagtacgggctcaacatcattgtcttcatcagtggtggttgctgatgaaaattcatggaatccaattacttgggaaatgtcattgaaaaatcctttttatggatattttggttcgaaaacttttgctgaaaaagaagtttggatatttttacaaattgaaaatccaaaatttaatataacgacaattaatccaggtatggtattaggaccacaagcatttcccataaacaaccataatggtggtggtgctggtgctggtggtactaacaatttagaattgaatacttcatcacaagaaatagttcgattattgaatttatcaactgttgatgatgttaataaagttaagatttcaactaaagtagagaatacatttattgatgttagagatgttgcaaaagctcatattatagcatttgaaaaacctcaactaactaaaaataaacgattactattaattgaagatatttataatgaacaaacattacttaatatcattaataacaattttcctcaattaaatttaccaaaaggtgaacctattactggtcaaattgatgaatccaaattaaataatacttggaatactacacaaactaaaaccatttttggtgataaatatattggaattgaaaaaagtgtgattgattcagttaatcaaattcttgaagctaagaatgagggtaatcctcaatgtaaattgtaa

SEQ ID NO: 6064 - DNA, 1188 bp, Candida albicans
atgccagaatctacaaatacaatcattaacagttctgtcaaaaaaatcaaattaagtgctctttgtgaattatgtcatggtagaaaagcggtaatgaaaagacccaagaatttgatgaaattatgtaaagaatgtttttataatatatttgaaactgaaattcataatactattatctcgaatgatttattttatcgtggagaaaaaattgctattggagcatcaggaggtaaagattctacagtattagcatctattcttaaaacattaaatgaacgatatgattatggattaaatttagtattattatctattgacgaaggaattaaaggatatcgagatgattcattagccacggtgaaaagaaatcaaaaacaatatgatatgccattagaaattgtatcatataaagatttatataattggtcgatggatgaaattgttgcttgtgcagggataagatcaagttgtacatattgtggagtattacgtcgtcaagctttagatcgaggagccgagaaattggggattaaacatgttgtcacgggacataatgctgatgatgttgctgaaacggtattgatgaatttattaagaggtgatgtggcaagattagaaagttctactaatattatgactacttcagcgggatctcccattaaacgatcgaaacctttcaaatacacttatcaaaaggaaattgtattgtatgcccattataagaaattagattatttttcaactgaatgtacttatgccccagaagcatttagaggtacagctagagaattattgaaatctttagaaagtattcgtccatcttgtattatggatatcatatatagtggtgaacatttagtgctagcacctaaaaagcaaaaacggaaaaccgttgcctataagaataaaaataagaacaagaagaaatcaaacagtgaacaagaggaacaagaaaaacaagaacaagaagtgaatcctgatggatctatatctttgaatcaaaatggaattaaaaaagatggtaatacatgtgaaaaatgtggttatctttcatcaaataagatttgtaaagcatgtatgttattgaatggattggaaataaatcgagctaaagtgacgattgataataattctgctattgatggtgcagcaaagcttactaagaaattagaacaattgagtttttaa

SEQ ID NO: 6065 - DNA, 2358 bp, Candida albicans
atgtctaattcaagtatagtccctacatataatgggtatattcataacacaagagatgcattagcagtgattcaacaagttcttgataaacaattggaacctgtttccagaagaccccatgaacgtgaacgaggcgtgcttatagtttctggaagtgtatttgtgtttattgaacaactgtcgggaatcaaaagatggacagatggtatttcatggtccccatcaagaatccaaggtcgatttttagtatatggcgaattggataaaaagaatctaattgataaagacaagaagaagaaaaagaagcgtaaatttggtcccgacgacgagtacgaccacaatgtcaatgaaccagattatactggtgggtatggtaaccaccttcataatgacaacagaagtcaccttaataagaattctcgatcaggtccaatgttgcttgcgactggtacaggtagtatcactcacactgtaatagaaaataaaccatcgtcatcggcatcaatgattcattcaaatgttattccagcatcgagttcatttttaaccgactacagaacgagtctaggtaatggtcctatggtttcagctgctatactgcaaaacggattagttaaaaagactataactttgacaactacaacaaaggaattacacatggaagggaaagctgaaaagcaaacaatccatcttataagttattatagtaaacaagatattgattcagggaaattgcaacgtccttctgaatctgatttaaaacacgttcaaatttctccagcgttatggacaatggtacaagaaaattcattaggaggcaaagctcccattgacgatgaagagtgttttatagtagatggccacaatcagtacacaaatgtttcctatattcaacaacaacaacaacaacaccaacttcaacaccaaccacttcttcatcattcttcttcagttgcaggaagtacaaccagtattgttaacaatagtttatcaatatccaatggaggttatggcaataattattccaaaaatttatcccgttcttacaacaagtattctaactcccaagtttctcaactactgtatatgttgccacctcaaacagaatcatcatcaacagcaacaattgcatctggggcgtcagtgagtgtgaaacgcgaagatgacacgaacaacggtagcaatgcccccactggcaatgaaaatcaatatgtaaatgcaattaatcacctgcatacttcatcatatggtggtcaaggatatgctacagatgctacaggtatagcaacaccagcatacaatagttattcacaagcaaatacaagcatcaatacatctctgcaacaacaacaacaactacaacaaggccaatatggccaatatgttcaatatggcgttgctccaagtaccatttccggtgcaacctctactaacaataatagtggtaatgctcctaatatcccacaagatgtatactatagtcattatacaggttttgttcaaccacattaccctcaataccatattgccacaggtaatgcatctgatcaatacaatacaaatgccgctaatcatcagtaccattcaaacaatactacttccagtgccaacaacaacagtagctcacgaacaacaggagtaggatccaaacgtaaaccaagtattgttagtaatagtaccagtggaagtgttagtggtggtaatggcaatggaaataactatggctacaattcaaatagttctacatcaaccaatcgaccaccagcagtcagtaccaacaccacaagcactacaagtggaggctctagttttagtggacctagtagcaacataactacaaattccatgtcgaataatccttggtttaatagttctacaaatatggcagtgaattcaaattatattacaagttcaggtggtggtaattcacatggaggaattggaaataacgaatatgaacccatgccaatgactaataatagtgccagtattcctgcttattatcaacaacatgttccttctcatgttggttctgctcaacaacatcaactgcagcagcaagtggctggtgtaggagcaccacatatcattcataatcatccgtatcttcatccaacatatggtcaaggatcaaatagtgctagtactggtgataattcaacacctggtggatcaagtggtagtggtagtggtggtagtggcaacaatggtgctggtggatctagtagtgtagctgctacttcgggtgttactagttctaataccagtggtaatattgttactaatggaacattggttgctgctggaacagatgacgcagttggaaattcttctgggtcgtattacaccggtacttag

SEQ ID NO: 6066 - DNA, 1137 bp, Candida albicans
atgttgagaagaacgatatctcgtcaattccaaagaagccaaagtacctcgacaaagggattttggtccgacttttccaagagatcaccatctttaagaattcaaaatgaaaacattagaaagggattatttgaaggaatcgatgaacaaggaccggcatcaataaagaactcaaatattagagagatttaccattctcctattgctattgatgaaactttttctgaagcctataaaattctagaagctgatgcaagtaagaaatatggcagacttgaaaaattacaagaagaatatacaaaaatagaagataaatctagcaccaaggctaattccatcaagagagaaatcgaagaattacaaattgagaccgagttgagaaatcctgaagtattatacaatattgaatataattctgctgacgttatcgacaagtctcaaccaatatacagaaagttgttgaaggaaaaatggaaggaacacgatttgttgcttacaatgcaaagattggaacagttgcatgttattccagatactttgccaactttggtaccggaagcagatgttaaggtgaaattcagtcacaatgttgaacatgaatttagagattggattgctccaggatccattttgccaacatttgctgttgaaaaacctcctgtggttcaagtgcaagagtttgataaagttgaaggtaacgaaagattatacactgttttgttggttaatccagatactccagatttagagaaaaactcgttttcaactactttacattatgccttagccaatgtcctgttgaataacatcgataacacaatcgatgtgtcaaagcttttgaacaaaggcgacaaaatagttttaaaggattacttaccattgacccctgaaaaaaatacccccgctcaaagagcctgtctttgggtgttcagacaaaagaacgaattacagcccactgaaattacaagagagaattttgacataagatcttttgttgaatcaaacaatttactgccaattggagctcatgtttggagacaacaatttgacagaagtgtcaatgaaataagagagaaatatgggttggacaagggtagagttttctacaaagaaagaggattagctccaatgccctaa

SEQ ID NO: 6067 - DNA, 1794 bp, Candida albicans
atgtcaaaaataaagaataacagtcctacaataaagcaacgaccaactggtgtaacaacaactaattcttcttcatcaatagacgttgtaacgacttctgcacctagatatgaagacaattttttcaatgatgaaacaactcatgaaataactagtgaaactaactctacttccagctcatcgacaattttccaatatcttgccaccatttctaaaaaacttgattctttaggtgttgaaactagaggtattgaacgtatacaaccttatgaacgttccactaatcgtaccaaacaattcattagtgtcatgggattatggttatctgcatgtggtggattatcatcaatgtcatcattttatttaggtccattattatttgaattagggttacgtaatactttacttgccggattattaggagaaattttggggtgttttattgctgcttattgttcattaatgggacctcgttctggttgtcgtcaaatggtgagtggtcgatttttatttggctggtggtttgttaaattagtggcgttagtggctattattggggttatgggttggtcagtggttaatagtgttgttggtggacaaatattgagttcggtaagtgatgataaaattccactttgggccgggatcgttattattgcggctatttctttgattgtggccattgccgggattaaacaattgattcgtgttgaagcatttttaagtataccggtgaattgtgcatttttattattatatatcgttgcatcacaaaaatttgattatttaacttggaaagatgctgttgttgcaactgagggtagtgaatattctgcagctgcaactgttaaaggtaattggttaagttttttctcattatgttattccattacttcaacttggggtactattgcttctgattattatattttattcccagaaaatactccagattgggaaatctttgccattacttttttcgggatctctataccaacaacttttgttggagtagctggtattttaattggtaatgtagcattaacttatcaaccttggggtgatgcttataaaaaattaggaatgggtggattattaaatgaagcatttaaaccttggggtgctggaggtaaatttcttttaatgataattttcttatcattaatttcaaataatattattaatacttattctgcagcatttggagtacaattagctggtactatgtttgctaaagttcctagatggttatgggcaatccttttaacagcaatttatttaatttgtgcgttagtgggtcgtaatgaattttcaactattttaggaaatttcttacccatgattggttattgggtatcaatgtatttcatcatgttattagaagaaaatactattttcagaactgataaatttaaatatttattcacaaaggaattccctcgtgttaataaagaagaagaacaagaagaagaagacggtttggattcgtcaattgtacatcatcccattgatgcaagaattattggtacaccattgagacaaaatcaacattataatttcagtatttggaatgattatgataaattaactcaaggtttagcagcaacagcgtcatttataattggtgctacaggtgctgctgtgggtatgtcacaagcatattggatcggacctcttgctagacgtataggaggtgaatttggtggtgatattgccatgtggttatgtatgggatttagtggattggtttatcctccattacgttatttagaattgaaaaaatttggtagataa

SEQ ID NO: 6068 - DNA, 2250 bp, Candida albicans
atgtattatccagcaatatgtatatctgttgccatatcaattgtcttagtaccttttttgattcccatccgactaaaaagccctgtgtatcgcagaattaaagcttcacttatagttggcttgattatttcaatattaacagcagtagctccagaaacggctcagataggagctccattccataaatatggaaaaccaaagattgcattttttggatgcaattaccaaataatgttaactacagcaagattttgttcaacaaacgccacttttgaatggtgttattgcaacaattttccagcttttgctactcttgctcattgctatcaggtgggtcatcctggagagctagaatcattaatttccatgtgcaagccattcaacaaaaccataacaatgtctactgttaacgatgccgaggagtattacaagaaccatgcaaaaccagtggaggaaatacacaaacttcccaattatagccaagccaattttccagtgcagttgaatgagtccgaaatatttatcttcaaacagtcatatgaacagttcttagggaattatgacaaatcggtggattacggatggtatctagtattatactgggtcgtcgtgatagcagtagtaagcataggtaactggatcaaaataatttttcctaatctcaccaaagcattgacagatccagttagcaattggtatagaaaacacatcagcactccagccacgggctccagaaataaaaccaacgagcttcatctaacaaaaggtcttgagatgttagtgccatcaaggcttgaaacaataatattaactggtatgacagttatatgtctcaaaatgcttattggagattttcaatacgtcgaaggtaacccaattttccattctaaaataaatgctttattgagattttacgctgtgagaacaggtttgcttgcaagtgctctaatgcctttattgattctatttgcaggaagaaacaattttcttcaatgggtgacccgatgggattactcaacctttatcatgtttcacaggtggctttcaagaatcattgtgattttattcttagtacactcagtatgctactctttgtatttgaaacaacactcaaaaaagcctgaggcgtacatttattggggatttactgcaatgttggccggtcttattattttggttcaaggtttgctagtattaagaaggcgatggtacgaaatgtttttgatattgcatattattttggctatagttttcattggtggtgcttggaagcacgttgacgcattatattgtgtttggttttactacacgtctgctgccgtttgggcatttgatagaataatcagaatatgtcgacttgtttcgtttggatttcccaaagcccaagtttacttgctaccagatgagacattaaaagttgttgtaccaaagccagacaattgggaagctgttcctggtggtcatgcatttatccactttttgagatttgattgcttttggcaaagtcatccatttacctacactacatcagaaagggatatcacattatttataaaggtaaagaaaggagtcacgacatcattatgtcggtatttgaaatctaacgaaaactgttctgccagtattcgagttgcaattgaagggtcttacggtgaatcaacccctgcaaaacatgctgacatggcagttttcattgctggtgggaatggaatacctggtatatttgctgaagcacttgatatcaatagacaccaagaactgaaacatacagtgaggttgatttgggtggtcagagaatataattcattactttggttttatgaagaattgatgtcattaaaagatacacaaattgaaaccactatatatattacccgaccaggtatattggtaaacgaggatgatttcaataaaagattgccaagaatgggtcaaaatatggaaaatgaattacagcctttgttgcagaaatcagtacctgctgcttataattcagaaccagtgaattcagttggaggaatacacagccaaattagagaagagctatttcatataaaaatcattgaaggtagaccaagtatcgaaaaggtaattgcaacatgcattgaggatagttcaggatcagcatgctttgttacgtgcgggcatcctgcaatggtagatgatataagagctgcagtagctaataatattgataacaaagagggaaaaagagtagattattatgaacaattacaggtttgggcatag

SEQ ID NO: 6069 - DNA, 1668 bp, Candida albicans
atgttcaaattactaataccgaataagtataattacgtgatacgaccattggtaaggtttaaatctataaaatcaccaaaatcaccaaaaccaaaaccaactgcaaaactcagtccaaatgtgttttctctgggtaaattttctcaactacataatgataccagcactactaatattgaatcaaaaataactagttttgatcaattgaagattttcccttcggttagagaagccatgattaaagaaatcaaatctcaatacaatttaaaaggtccacgacattctaatattgatgaaattgatatcaaaccaactcccgtccaaattgctgctattcggaaaattaaccaaaccaggaaacttaaagtgcccaataaagatttagaaggtatggatgatgctgaacgtattcaatttgaattacaaaatgctaatgaaatacagaaaactaaagtattcaccgttgctgctgaaactggatcaggtaagacttggtcatatttagctccattattgagtaaattaaaactggatgatatggaattctggaaatctgatccagaaggttatgataatacgaggaaaaaaggtcaatttgttaaatcagtcatacttttaccgacaaatgaattagttgatcaagtttatgaaacattacaacgagccaattcatttgaattggaacataaaggtgcccctggtaatttcacactgtttttagaattgccagaaaataaaaccatgaatattactaccatgaaattgggacaaggcgaagcaccagtaagattattccgtcaattagaaactaaaggtccaattgatgttttaataacaactcctggtaaaattgttgccttttctaaattggtcaatatcaatcgtccatttagagttttcgctaatgtgaaatattgtgttttagatgaagctgatacattatttgatgattcatttgagaaaaacactactgatgtcattactcatttccctaaattgcttgatttaattttggtttcagcaactatccctaaagtatttgagaaaaaattatcgaaattatttcctgatcaacgttcattaattagagttgctactcctctgttacataaagttccacgtaacatcaaagtaatgactattgatgctgatgttgctccttataatggatccaaacctagatgtttagcacaagctctttatgccatatctaaagatggaactgaaccaggttacgtcaaaagaattattgttttcgtcaatgagaaatctgaagttgatgggattgttgaatcaatgattacaaaatataaagtaagaccagaagatattgttggagtttccgggtcggttaatatcagagatcggaaagatatgttacaaccatttttacaaccggcagaattgattgaaaatgatgattttggtagtaaagtgaaaatattggtcactactgatttattagctcgaggattaaatttccaaggagtgaaaaatgtcatattattaggattaccgagaaattccgttgatttggttcatagattaggtcgaactggtcgaatgaatcaaaatggaagagtttttgtcattgttgataaaaaatctaagaaatcttgggtaaaaggattaggcaatgcaattattcgaggacttcgaattggttaa

SEQ ID NO: 6070 - DNA, 1260 bp, Candida albicans
atgccggtagctaaagacaaatataatttaagaccatttaaagaagctcccttatcaacatctcccatcaaaccaatagaattagaagcggttgatttatcactttataaagatggtgctgggaatttaccaattagacaaaaattagcaactcaaattgaaaaatctctttcaacatatggttttatcatggttacaaatcatggatttcctcatgataaattggaatttcttaaatcattagctcaagggattttagaagttcctcttgaaagtcaaaaaccatatttggcaggagcgttaaaatctgatttagaagatcgatcaatttcattaggtgctgaaagaggtgctggttataaacctaaaaaatattggtcaatgagaaatggagttgaagattcaattattcattataattttaataatatgcaacatccactgtttttccaaggatcaggtaatgccaataataataatcaatatcctcctatagtgcaagaccatttatcacaagttgcggaatattatcgatatttacataatgatgtattaaggaaactttgtaatttaactgatattgttttagaacttccagaaggtttcatttgggacaattattataaagttacacctaatgattatgaaaattctggtggtggtgctggtcgattcatgttatatgaaggtatggatcctcaagatcgtgaaaaagtcggtgatacatggttaaggggtcattccgatagtggaggattcacatttattacgtctcaaccaattctttcattacaaattcgagattatttcactggtgaatggaattatgttggccatactccagatggattgattgttaatattggtgatgccatggaatttatcacgggtggatatttcaaatcttctattcatagagttgttggtccaccagatgatcaaaaagaattccgtcgattagtattgatctatttttgtaaacctaaatcaacttgtattttggatccagaacctttacaatcacctaagttgaatcgtttaggtattggtaaacctaaagaatgggaaaaaattgattttgctgcttggaataatgaaaaatcacgtttatttggtaagaaaaatgttaatgatactcaatctgaagaaccaaaattagttttactttatggaagattacatgaaagatggcatcaagcagaaactgattttagtttagaagaagccgagaaaaaatttcaagtcattaaattaacctaa

SEQ ID NO: 6071 - DNA, 1770 bp, Candida albicans
atgacaatacaatcatcaatttcatcttcaaatcaatcaataacaccaaaaactaaattaacaaatcttgaacttgaacttgaacttgaacttgaagaagaggaaggggaagaacaaccacaagaagttcaagaaataaattcaacttctttttcttcttcaattacatttggattatatgatgaatcagatggtgataaagcctatttagccaaatctaaattaatagctgaatcaattcaatcaataggttttggaaaatatcaaattggattattttttgttgctggatttggttggttaagtgataatgcttggcctgtagctacaagtttaatattacctcgattaaatgaaattaatggagttcatccaccaccaccatcatcatcatcatcatcatcatcatcacccaacaagggaccatatttgatgttggcacaaaatttaggattattattgggagcagcattttggtcaatatcatcagatataattggacggaaatgggcatttaatttaacatttttaatcactggtatttgggcaattattggtggttcaagtccaaattttatagccctttgttgttttgaagccttttggagttttggcgttggtgggaatttatcagtagattcagctatatttcttgaagcattaccaagttcatatcaatggttattaacggttatgtcagcatggtgggccattggacaaattgtggttaatcttatttcatggggattaattgcaaatttttcatgtccaacaatagacaacgacgttggtagtggtagtggtagtggtaatattatatgttataaggaagataataaaggttggagatattttttatttactatgggaggattaacgttacttatgtttttcgcaagatttgcttttcaaatatttgaatcacctcgatattatcttgcaagaggtgattcaattaaaactattgaaacattggaaaaaatcgctaaaattaatgggaaaacttgtcctataactattaaagatttacaagatattgatgaattgtatgatgaatcggaattagaaaaagaaacagaaacagaaacagacaccaccactaccaccaccaaaaaaaataatagattgattaaagaaaaattgaaaaaatataatttatctcacgttagacaatgttttacaacatcgaaaaaaatgacattatcaataatattagtggtttggttatggggagttataggattagcattcccattatataatgcttttataccaagttatttagaatctcgaggtgatgccaataaacctttaaccgtacatgaaacttatcgaaacacattaataatatcaattttaggtatccctggctcattgattggtggaatattagttgaattaaaaataggtcgcaaaggaacattatttttatcattaatattaactgggatatttttatttggatcaacaacggcgaaaacttcaaaagcaaatttggcttggaattgtatgttttcattcatgtcaacgattatgtatggagtattgtatgcttatacaccagaggttttttattcacaaattagaggtacggcaatagggttagccgcttcatttaatcgtattatgggagtatttgctcctataattgccatatatgctgatttaaccacttcagcccccatatttgtctcaggagcattattcatttttgccggaatcttgagtttatgttgtccatatgaaccaaggggtaaaccaagttattaa

SEQ ID NO: 6072 - DNA, 1443 bp, Candida albicans
atgtctggaaatttcactggaacaggcacaggtggagatgtgttcaaagtcgatttaaatgaacaatttgatcgtgccgatatggtatggattggcactgcaagtgttttggtatggattatgattcctggtgtgggtctcttgtattcagggatctcccgtaagaaacatgcattatcattaatgtgggctgctttgatggctgcgtgtgtggcagccttccaatggttctggtgggggtactcgttggtttttgcccacaatggctctgtgtttttagggaccttgcaaaacttttgtctcaaggatgttttgggtgcaccatctattgttaaaaccgtgcccgatatcttgttctgtctttaccaagggatgtttgctgctgtcactgctattttgatggctggtgctgggtgtgaacgtgcgagattaggtcctatgatggtgtttttgtttatctggttgactgttgtttactgtcctattgcctattggacatggggtggaaatggttggttggtcagcttaggtgcattggatttcgccggtggcggtccagttcacgaaaactctgggtttgctgccttggcatactctctctggttgggtaagagacatgacccagttgccaagggcaaagttccaaaatacaagccacattcggtttcctccattgttatgggcacaatctttctttggtttggttggtacggtttcaacggtgggtccactggtaactcttccatgcgttcatggtacgcctgtgtcaataccaatcttgctgccgcaactggtgggttgacttggatgcttgtcgattggttcagaacaggtggtaagtggtcgactgttggtttatgtatgggtgctattgctggtcttgttggtatcactcctgctgctggttacgttcccgtttacacgtcagtaatcttcgggattgttccagccattatttgtaactttgcagtagacttgaaggacttgttgcagattgatgatggtatggacgtgtgggcactccatggtgttggtggatttgttggtaactttatgactgggttatttgctgcagactacgttgccatgattgatggaactgagattgatggtgggtggatgaaccaccactggaagcaattggggtatcagttagcaggaagctgtgcagtcgctgcctggtcgttcactgtgacgtccattattttgcttgccatggacagaatcccatttctcagaatccgtctccacgaagacgaggaaatgttgggaaccgacttggcccaaattggtgaatatgcctattatgctgatgacgatcctgaaaccaacccatacgtcttggaacctatccgttctactactataagccaaccattacctcatattgatggtgttgctgatgggtctagtaataacgactcaggagaagctaaaaattaa

SEQ ID NO: 6073 - DNA, 1635 bp, Candida albicans
atggttcaagaagaattatccttatttaggattaccacggggtatttttttctactatggtatataattatccttgtggcagcttacagtggatttttcgaaattttgttcaattttagaaatcggccaatattacatacaaaacaacaagctaatcaccaaaatgaccctgagagtgatgatgaggaaatatatgaaggagtaacaattatacgaccaatcaaaggtatagatccagagttgacatcgtgtttagaatcttcattctgtcaaaattatccaagaagtaaattacagattttgttttgtgttgatgatccgaatgatccttcaattcctataattcaaaaattgatagcaaaatacccaacagttgatgcccaaattttaacaagtgaaagttataactctcaaacgaaaaccagtgatgaccattatggacctaatccaaaagttaataatttagcaaaggggttcgttcatgccaaatatgatattttgtgggtgatggatagtaatgtttgggcaagttctaatattttgaaaaattccgtaatttcattgaatggtaatttaaatatgtcgagaaaaatgggacaatctagaccagtgaaactagttcatcatgtaccattagcgttaagtatcaataatacaaccagaagtgatgatttcattggtggtcaagatttagaaattacagctatgacccctgttccttcatctgaatcccttaattcacaattagtgaaacgcaaactgtcaccgaaatctaacaattctttgaatgtccatccaggttttacatattcaaagttttcaaagaaattgggggctgaacttgatgaaatgtttttacacacctcccattccaaattttatgtgctgttgaataatttagcagtggcaccatgtgttaatggaaaatctaacatttatcgccgttcagatttggatcaatcagttagattaattcctcataaggactctccattttttaaagaccctaaagtgaaacaagatgcagggtattatacttcgttaggcgttggacatgcaattaagtttttcgcaagatacattggagaagacaatatgattgggattgcactttgggaaaatactcaaggaagaaccggattaactggagatgtggttgtgcaaccgtatagtgggtcagaaaataatgccgttaaagattatattcaaagaagagtaagatggcttagagtcagaaaatatatggttttgttagcaacgttgattgaaccaactactgagtcgattatctgtggcatctatggtacttatgccatttcaactgtttttttcggtacttggttcaataagtactggtttgttatgcatatgcttatatggatgttgacagattatgtacagtatcacacattgataaaccatacattggatgttaaaaatatcacttacttacctaattggttaaatgagtccatcccacctaaacaaagaaactgtttgcaatggggatacatttggatactaagagaattgttggcattacctatttggataattgcgatgataggacatgaaatcgattggaggggaagaccgtttaggattaagaaagatttaactgctgaagaaatgtga

SEQ ID NO: 6074 - DNA, 2904 bp, Candida albicans
atgacacctccaaagattgaagagcttccggacgaagagcccaaagtggcaaaaccacccaagaagaacccatttgcattacgtcccaaaaagacaactattcaaagatctgtggatgaggtgtacccattacgaaagggcctcaataaacccgagatcaaaagcaccaaaccaatcgacttgttattcgaaaaattggaaaatgtgttggatttagagtatgatcagttgactatcgatgtcttgtaccaacgtttgttcaatgataaacaagagtttgattcttttacgaaaagatatgaagttattgagcaattgctagattatttgattgatatacagaaattgtcaatgaactcgattcaaaacgacgataaaaatcttattgccatttcattacatgacctcaagacatttagtaagttacttaatgtcatcatcatacacggcgtgtatccgcctttgaatatactccgcataggtatacagtttgaaaaaaggcaattaaagaatttttcaaacaacaagaacttgattaagattgacaagttgcctcagactgattttgcatatattgaaaagcttttgactttgatttatacaaagctattgcgggttttactgataaaatctgatgttgctagtttattattaaagggaaccggctacaccgactttttggttgtggctattacattgattgtcatccctcagtttaattccagtgatatcgactttgctaaaattgaaagcatagcatcgacgtttgagttataccagacatattctttgttgttaaccacaccatctccagctattttcaaaaagtttgtaatgtcacatttggggtcactccactattcaagaccaaatggtatactcacactaattgagtttgttcttgggttgcgagaccaagaggaaataaacatcgaaaagtttgataatgtggcaaatgttgttttgcagaaacccgccaacgtcgacaccaagagttattttatgtcagttgggaatcaaatgtatgacttgttgattaatatcaaccgaccaaatgttacttcatgtgtggcatatgttttggaaaaattatggcagagaaacaaactagttgtaacggattttgttttgcaaagaatatggaacaacttcaatcctccaccaaaagacgaaggtatcttagtgactgaagcccaattgaataacaatattaatgtgatattatctttaaccaaaaaggggttggaacccgatttataccaagctgttattcaacctgtgttactaccactttgggggtattacacctttctaaaacaaaacggtaaagaaggtggggtcgccttgaacattttgactagctattttacattaatgaagggtatcgacgatctgggattgccaactatagctaaaaatttactttacaaacatggagaaaactggaaatatgaatttggcgacaacaacttgacccaaattgtgacagaaaaacccgaatttgtatctcagagcaaagagtccaaaatcaataaattcttgaacgatttggactttgcttgcgaattgtttgtcaaggtattggaggaattggatgatagtctaattcaacagctatttgtaaaaatcttgaacaactggttaaacaatgacacacaaattttaggaggcgaagaaagagatccatttctaatgcttcttgatttacgtttattagaaaaaataggggagaagtttagagagaatttagcaacgaacccaattgatatgttagaattggtacagagttttctcagttcctacaagccaaacagcaaagagaatgaacacagcgccgaagattcagacgacgaaatggatgacgatgagctggagtttaatctggatcaaactataactgttctcctccagttattgtcagcaattatttccgaaaacgatattattcttgacaacaagggttccgagttgttgtcgagtatcaaaaaaattctatcgacgaattcacagtttcaagctagctcacttaagggttcagcagatgcattatgcacaagaattgaaagtttactatctaacaataatgagatacttcctgccaacgaatctgaagcccagaaacaaattttgcagcgggccataaccaatttaaacgaccccttagtacccattcgagcccatggattatatttgttgagacaattgattgaaatgaaaagctcagtaattacattggattttgcaataaatttacatctcgtacaattgaaagacccagaaccatttatatatctcaacgtgatcaaaggacttgaaactttaattgagtggaacgagccactagttttggatagcttgtgcaagttatatttacaagatgatgttgagttggacgaaaaactaagaattggagaggtgattcttcggtatattcaaagagcagggcaaacatttaccgggaattctgctaaattgattgtagaaacaacattggcggtgattcgaagagcaggcaacaatagaaaagatgacagattaagaatgtcgagcatgtcgttgttgggtacatgttgcaaggtcaatccgttggggatgattgataatttgaactatgcgttggatgcaagtattggtattttggaattagaaacagacaaggatcaagctataatgagacgtgcagccattatgttgatatatgatttgatactaggaacatcagagactgacaaagtcgagtttcctcagcagtacaaaagcaaggttataactgtattgagatatgttgctgaaacagataacgatttattggtcagagaacaggcacaaaaagtgttcgcaaccgtggaagagttgattgaattagccatggaattatacaaagaggaaaatcaagtacaatga

SEQ ID NO: 6075 - DNA, 1191 bp, Candida albicans
atgtctgatactgaagaacatctacaacaacaacatgtcgactctagagagttaaagaaggaaaaaaagagtaaaagcaaactgaaatcaaaaatatctgattctgatgaaatagaaatcgatttaaatgctcaaatcccactttctaaaaagcaacaacgtcaattgaaaaagggtaaattagatttagaaaaactagccagaaagaacccatcacctaaacctgaaactagtacaaatgacaacaacgaaaactctgaagatgcttctggtgtgaatctgacaacagtgacgtcaaagaaatcaccatttggtgtttggatcgggaacttatcatttgacaccacaagggaagatttgattcggtttatagttggtaaaacaactactctggatccaaaaataactgaagaagatataactcgtgttaacattccgaaaaagggtaatcaaatcaaagggtttgcatatgttgatgtaccttcttcgtctcatgttgaaactattgttggtctttcagaatcaattttgaacgggaggaaattgttaattaaagatgctaattcctttgaaggtcgtcctgaacaatccaaatcagatgcaacacaaagtggtggaatcaatagttcaaacccaccaagtcgaattttgtttgttggtaacttatcatttgatacaactgaagatttattggaagaacatttcagacattgtggggaaatagtgaaaatcagaatggccactttccaagacacaggaaaatgtaaaggttttgcctttattgatttcaaagatgaagaaggtgccacaacagcattgaaatcaaaattaaccaaaatgttaatcaatagaaaattacgaatggagtacggagaagatagatctaaaagaagaccaaaaagagccaacgattttggtgatcatagtaataataataatgatagctataaagagaataatagaactgttaacgacaaacctgaatttgattccctgaatcaaagatttgatggtaatgattcttatggtgaaagagataataaaaagagacaataccgtgaaagaaatgatggatataataagaccaacaattccaacaaacgtatgaaatcttcagttgctctagcctcggcacaaagagctagtgttgcaattgtcccatcagctggtaaaaagattaagtttgattag

SEQ ID NO: 6076 - DNA, 1308 bp, Candida albicans
atgctttcaacccaccattgtataatacctaggttggctaaatcatcaatatgtaccaaaagacaactctcctttttctggaaaatgttagccatggatgattcaaagaataaagtgattgaacgtccgttgtatacatgggatgaatctccatatgaagatattcgtgaacgtgcagcaatgattagagcccaagctttatgtcccgtcacctcaaaaccagtcaactttgtttgcccatattcaggtattcctacacatcactcgaaggaagcatgggagcaagacaaacaatatcacgagtcaaaagtatatgaaaaattgaaaaaagttaacctttacgaacatgacttgaggtcagggagaaaatttgctgaatttgcctttcccaaaaaacaagaaagagattttatggttaatattagtgactgggactcatttttttacacaagggatttcccacccatgaatgatgaattcaatttagcagcagcaactaaagttttgacgtatccaattactattgcctcgattttacataaattttcacctttacaattggaaccaaagggacctttgacattagaaggggccaagtctttgggggcattgagatacaccttgtatccaccacaacttggaaaatcatcaactaacgccgcatcaaccaattcagacgacaatgctgctgaaattgcattcaaagaaagaccaatgagaatctttttgattggaccaagaatggaaggaatgttgccaggctacatatggaaacaatttggttatttattccctaacactgaatttgaaattcatttaattggtccagaagcttactatgataaaaagttgcaaaagttcactcctgtcagcgattcaaatggaaggccattagtacaaagatttgacgaacaaataacattacactaccactctaagtttttcaatgagttgtatgatatgggcgatcttttcccatttgatccatatttggatattttcttctgtttccatcctaatttccaatctgctgatcagatacattgggacaagtcgttgaagggattgttggagtcgaaatgccctgttttcattagtggttaccacgaacaagaattaacgaaagacattgaatggttgaagaatcacgaattatacccagaaatggatataatcttgaatgatactccaaataaatttgcttgtacaaaatacgatataagagtaactgaccctacgaatcctttgaatttgaacagtagacttttcggtttcagaggtaagagatatcatgctattcaaacataa

SEQ ID NO: 6077 - DNA, 1134 bp, Candida albicans
atgattaatgtattcaaacctattgttcaacgtgatctagtgccaactgcctattataataatgaaatcttacaatacaacggcgtttctcctaaagacacacctatacttccattcaaccaaaccatagaagacttgaatagagatatttacgccaaacctttacattctcataacgactactggagagaatatccattattttcagcattgagtgcaggtgcaattagtgtcgaaagtgatatttggtatttcccacaatcttacaaattgacaagaacggttactccatctacaagcaaatacaacaacaataacaaacaaggcaacagttcagttaacgaaacgctaattttcaaaaatgatgaaatttatgttggccatagtcaagaattcttgaaaccgataaatacattatttaatttatatttaaatccactatctcaattcttacaatttgtcaatccaacatatgagatcattgatggtgatagcaactctgagaattctcgacttgaacaggatttttttgcacaatctcaactggagaggaacagtgttttttataacaatcctggacaaccactttatttgtggtttgatttcaaaaccgaagctaattcaacttatgatgccttaaaaccattgttgaaaccatttatagataatgggtatttagcctattataatacgactgatgacaagtattattctggtccattaatcttaacaataacgggtaacttaccagttgaaaaagtaactaatgaaacaataagatatttgtttttagatggcccattagataagtttacaattgataataacaatacaaataaagatgaattgaaaaaatggtcaaaattatctcgtgtggcaagtggttccttagagacaattttgggatcagagtcatacgcaactagcactaagaatgatttcaatgaagagcaaaaatcacaattgaaacaagtgcttgacttggctcatgaatatggattaaagacgagaatttggggtgatataacttggccatggaacgttttagatctgcatttgaaaattttgtttgaattaggttctgatttattgaatgttgatgatttagaaagggctctgcagttattttcataa

SEQ ID NO: 6078 - DNA, 1410 bp, Candida albicans
atgagatttcccaatgttggcttggccgagctatctaagagtattatcaaaatccgtggccccgatgcaaccaagtttttaaatggactagtaacttctaggttacttccaaacgtggtgaagaaaaaacaacacactataagtgaatctgaaaatagacattcaaatttttcagagattattgacgtttccaaaaactatggattgatgcatgaagatatttacgaccccgattataacataaatattagcagagacggaatcaattcaatgattttgaattcaaagggtcgagtagtaacagattgctttttatatccagaccctttccataacgtggatggggttttgcaagagagtatgaatgagccgggatatttattagaagtggatacactgatactgcaacaattgatgatgatactaaagttacataaacttagtgctaaagtcgatatagtccccgataaaaaactttattcatattactattatgatgacactgccacatttgatgcatggttggaaaatattcaattcaaatactttaaaagtcttgatccaacaactgctttacagaatgcaaactctttcatcaaggacaacgttttcttcaatcaacaaatagctaagaatattttgggatttgccgttgataacagaattccaaactttggtataaagtttatctcgaataagccaatatccactaataatgacaaagacggtcaacaggatgtgatcccggtagagtcacttttttctgaatcatttagccaggaatttgacacacctactattaacgagagtggtgttgttcaaagacgatttcaaaatgggttatttgagattcaggatgcatcaaagggcagttctttattgccatttgagtgtaatcttgattataccaatggtttgtcgttggacaaaggatgctatgttggccaagaattgactattcgtacatttaataatggtgtcatcagaaaaagaatattccccgtacaatttttccaactaacagagtataatatcagctatttacaagatcatcccattgatttgaacatgctggacccagtggtagaaaacttgagtaatattccaaattcatcattagggaaattggaaattacaccattcgacgactctgagccacaacagcaacaaccacctactaatgaaagtccctttgcatcatcaccatttggctcttctaaagttgtaaggaagagaaaaacatcacttgggaaaatagtttcagtaaaggataaccttggattggtgatgtttgcagtttctgatgtggaaaagtgccaaatttataaactcgaactaccttcatttgaaggcggaactcaattcatcggtgttaaagttggtattcccgattggtggccagtaaattga

SEQ ID NO: 6079 - DNA, 597 bp, Candida albicans
atggcacaaggaaaagtagcaattatcatttattcattatatcatcatgtttatgatttagccttagctgaaaaagctggaattgaagctgctggaggtgttgctgatatttatcaagttgccgaaacattatctgatgatgttttagctaaaatgcatgcaccagcaaaaccagatattccaattgcaactcatgaaactttaactcaatatgatgcatttttatttggtattccaaccagatttggtaatttccctgctcaaattaaagctttttgggatagaaccggtggtttatgggctaaaaatgctttaagagggaaatatgctggtgttttcgtttctactggtactccaggtggtggtcaagaaactaccattattaatagtttgagtactttggctcatcatgggattatttatgttccatttgggtatggatatcctggtatgactgatttagaagaagttcatggtggatctccttggggggctggtacttttgcttcaggtaatgggtcaagaaaagttactgatttagaaaaagctattgctaaacaacaaggtgaagatttctttaaaactgtcttcaaatga

SEQ ID NO: 6080 - DNA, 1659 bp, Candida albicans
atgtcaactatcactttaacaagagaatctcacaagaacccatcaaaattcagaatcaaccaccaagatgaattggacattttaggtccaaatcgtaaggatcggtatgctatcaacgataaattaccaactataaccacttcttccaaacttgctattattggtgctgggtttggtggtatggccggtgcaatcaaaactatggaaaaatatgacgaacatgatattcaaatttttgaaagacatgacaactttggtggtacttggtacgctaatacttatccaggctgtgctagtgatattcctgctttgtggtattcattttcatttgctttgacatccaattggagtagaattcaaccgccacaatatgaaatggaagagtacattttacgtgttgctgaaaagttcaaattgaaagaaaaaacaagattccaaactgaaatcaacaaagttgaatgggatgatgttaatggtgaatggactttatatgcacacgatgttaaaactggtcaaagaattattcataaaagtaagcttttacttgcatgccaaggtgggttagttcatccattacattttgatgctaaaggattggaaaatttcaagggtccatacatgcattctgctctttgggatcattctgttgattttagagggaaaaaagttgttgttattggtaatgggtgtagtgctaatcaaactgtcccagccttgctcaatgatcctcaatacaatgttggttcgttgactcaaatctccagatccaaacattacattatgagaccacttcctaaattgatttacacgctttaccgtttgttttcattcaattacttcacaatgtattttttcagattgatgtttatttttttctccgaattgaaggttccattgttcaaaggtgaaggaattatttccaattatgtacgtaaattaactactgaagcatctgttctgtacatcaaagaagttgccccagaaaaatatcacgataagcttattccagattacaaaattggttgcaaaagattgatttttgattataactacgttccatctttgaaagatcctagaattgacattaaaaccgaacgcattgataaagttgttgaagatggtattttgttagaaagtggtgaacatattgaagctgacattattgttgcttgtactggttataacttgagcaaaagtcattttaattttgaaatagttggacgtaaaggtgctgatattactcagctttggaaagaagaaggtgcaagtgcttatagaactcttttgatcaaacactgtccaaatctctggacaattggcggcactaactcaatcactggtcatgcttcagttgttatgggtattgaaaatggtgttgactatttcctcaagactgctaaacctgttttccaaggaaaggcaaaatctgttcaagttaaagatgaagcttacgataactggcttactactcttcaaaaagaaatcaacaagtccgtttttggtactccatttggtggttgtgtgtcttggtactctggtgcaaaagtcaattctatctcgtacccttggagtcagcttcattactggtggaaaactcaatttcctacctacagagatttgaattatgaaccattagatgaaaacaagaaaagaagataa

SEQ ID NO: 6081 - DNA, 1893 bp, Candida albicans
atgagttctgaagatcaatttacttctattcaatgggatagagatgatggcgaaaatactaacaacactccaactgatacaactattaaatcaaagtcttctaaatctaaaaaatctaaaaaatcatcatctaagaaaaagaatgggaataaaatatctcctctgtcaactactgaaacttctgatgctgatgatacaatgaaagaagtgacagatcaattggaatcgacacaaataaatgatgataatcatgaagtagatgacggaaataaagagcaaaatgttgatgccaatcaaattggtaatagtgatgaagatccaacaaattcattgttgttaccagtaaatcctcaacctaaagaaccgcaagaagagaaagaagacttacaacaacaattacaacaaccacaacaacaattggcatctatacaacaagaaccagcaccaattcaacctcctttcaatgcagttgtgaatgatgaatcattgtcaattcaacagcaacaacaacaacaacaacctactggatatgttgatatttcttattatgaaaaatattctataaaaacaactgtgactcatcctaatcgtgatttagatactgcatcaaaaccgtttatttcatatttggtcactactactactgataatccatctatattaaaattaactaaagagaaaaaacctaaacagggagaggaatatttgacatttagtgttagaagaagatatggagatttccgatacttgtatgaaagtttaagtaatgatttccctaccgtgatgattcctccattaccttcaaaactgaatttcaaatatttgactggtgatacattcagttcggaatttgttcataaacggttacattcattggatagattcattaggtttattttacaacataagattttatctcaactgtcaattttccatttatttatttctaattcaaatgattgggctacattcactacatctttaaaacttaaagattcaagttctgatgaatcaggaatcgttggtagagtagttaatgaagatttaataactgaaaccgtgatgaattttttaactccatcaaaacataaaaaggagacaaataaagatattttagaaattaatgataaattgaagaaattatatgaaaatttaattaaattagataaaatttttactaaattaaataaaaaaaatcatgaattaggtaatgattatgatcaatttctgaatcaaattttaaaattatcatcagtacaaaagggtgaagattcaatcatgacaacaaatttcaaaattttttccgattctttaaattattttctgaaatcttataatgaaatgtatcgatacattgatgaaaattttttgatttctttacaagatctagcgaaattttgtttaagatttattcaattgattaaattaaaaaatgataaatctactgatttggccgtattacaagattttttaaataaagaattagccaacaacctgggtggtagtggtagtggtagtggtagtggtggtagtggtctccatcaaccacctaatccagttattagttcatatcaagggggtattgtaaataatactacacaattaattaaagatacattatcaacttcaaacaccaccatcagtaatactattaaatctgataaaattaaaaatttggaacaagaaatcgctaaagaaacgaaaattttaactgatttaactaataaaattattaatgaagaatacccaaattgggagaaatttaataaaattgaaattaaaaattcaatgcttggtctttgtgatcaaaatattaaattttataatgatttattggaaaaatttggggaagttgaaatgaaacttataaagagattagatgaagatatgtaa

SEQ ID NO: 6082 - DNA, 756 bp, Candida albicans
atgaaattttcatcagttgtattatctgctttattagctaatttggttgcttctgctccaattaaaacggttattgttactgctttcactactgttttggtagatagtaaaggtaacactaagattcaaactgaagctgctactgctactgctactcttagtggtaatgctgctgctgcaaacacagatgttactcaagaatataataccccatctacaacttttactgctacttcatataataacaataataactgggctagtgctccaagttctgttgaaacttctattgttgaaccagctactagtgaaattattgaaccatcaaccacaaataacattcaaactactttatcaactcaaaccacatcatctccatcaacaacttcagcaacttcttcttcttcttcttcttcttcttcggcacaaccaactggatcggaattttctggtgaaggtactttttactctactggtttaggttcatgtggtatcaccagtaccgattccgatttcattgttgctatttctcatgaattatatgattctaaatctgttggtaataatccaaatcataatccattatgtaacaagaaaattagagcattttatgaaggaaaatccgttgatgttactgttgttgatcgttgtgaaggttgtgcttataatgatttagatttctcacccgctgcttttgataaattggctgatgaatcattaggaagaattgatattacttgggaatggctcaattag

SEQ ID NO: 6083 - DNA, 1905 bp, Candida albicans
atgcccgcaaaaggtcctaatattataccaaaacaggcaccgtctcccattgcaatagcaggatcaccaccttcatcatctgcatcaacaccaagaagtgcagccagtccaccagtcagtgtgaatacaaaatcatctctcaacacaaacagcaatacgataatgccacgtcaagtgatgtcgatccaaacttcaaaagaatgggttcttccaccaagaccaaaacctggaagaaaaccaagtgttgatactccagcgtcgaaaagaaaagctcaaaatagagctgcacagagagcctttagagagagaagagcaaccagagtacaagaattggaacaaaaactaatggaagtggaaaaggaaagggacataaaggaaatggcattagtcaacactataaataaattaaaggtggagaaccagtttttggttaaaaacttggaacagttaaaaggtgagatgaaccaaatgaaacaatccttttctcgttcacaacaacagctaatatcgaagtcatcgcctgcagcttctacagcttctgcacaacagatcaaacccaccttttcatttgcaagtaacctggcaccaagcagtcatccttctccatcccatcacaatagtatatcgccaaccgggtcctcatactctgttcaacaaatttctccagcaccatctactgatctgccaccaaattcttacaacttaagcaatgattcatacagacaatttcattcaactttgactcctatttccaacaacaacaccccagataaacctttaagcgccgctgatgtagctaactttgattgtggtgtgtgtccaaaagaagagtgcctttgtgaatctgtggggttaaaggagcccacaaaagacaaaacagaaaacgctaagaagaaacttcaggatcaagttaattcttttaaaccaatgccagcagtttctttatccagaaaacgcaaaatcaaatcaactgatgaagaacaagaaatagatttcacgaaacaatttagtgtgaaagcaaaaccaatgcctgacttgaaaaaattgaaaaagacaactttttctcaaccccaaactgaaactgcatctacttttaatgaggattctccagttgacaattgtggattttgttctgatgacactccatgtgtatgtcgtgaagctgctaaagaagcagcaaaattgaatgagtacttgaacaaccctcaccaatcatcaataatggaagaagagatactggaagaagccaagacactaccacctttacaaaccaacaacccaaaccacaatttcagtaagtctgctctaccggtaatgcatcctgggccaactgtggaaattcgtgaattcacaaatataaatgctgtaccaaatgtattgccagcttccaagaatgaaaatgaaaaagaggaactgaccaaggatacttcttctgatggtggctgtaccggtaatccaggaacatgtcgtcaatgtcaaatggacccaatgtctacattattttgtactactgttgccagtcgaagtacaaaatcagattccgtttcttcaacaagacaatcaatatcaagaacaaactctaaaacatcaatatcgattgattctttgaataaccctcaaagtccaatacctcctccattattagcaaacaataaaactggtggctccaatgcaccaacaccaacaccagcaccttcaacaccatcccactcttcgtcggttctgagcaatagtggtattttcattccatgtgcagatgcttataagactttgtctcgtcataaaaagttcaactctgttgatttcacgactttagttggtaaattaacaacaagaggaatgcaagttgaggtacaatcagtagccaacgtgttacgagaattagatagaagagcatataattag

SEQ ID NO: 6084 - DNA, 531 bp, Candida albicans
atgtctcaaagaattggtattacagcatctgcgctcacaagagtatggcatcacgttgacgttgctgctgacaacagatccttaggtcgtttggcttcaagcatagcaattacattaatggggaaacataaaccaacatacactccaaacagagatcatggtgattatgtggtggtcacaaattgtgcccatcttaaagttactggtaacaaattgaaagagaaaacttactggagtcatactactcgtccaggtactttgagacttgtaccaatggaaagaatgattgataataaaggttatggtgaaattattaaaagagcagtcaaggggatgattccaaagaataaacatagacttgttagaatggacagactaaaacttttcgatggagatgaccatccatataaagataatttgattgctttcgctgatgaaaatcctgatatgagaaacaaacttgctgaattggagaagaatgaaaagaatagagctgaattaagagaaaagtatttatctcatcaacaataa

SEQ ID NO: 6085 - DNA, 627 bp, Candida albicans
atgaaacaaaaaaaaagggcaagacagacaaaaaaaaattttcaacataatggattactttctcttcttattgatttagataaccatatttactatactttgggcctattaacaatgttgagaacatatagtaaatcattgttgaagacatcaactaccataaagaaatcgttcctgttcaacacagcaactttatcgttacccaccaacaagaaatattctacttcagttcctgatgctaatgatgaatcacataccgggaaatttatcaattcgatttctaaaccttattcagtaaccacttatgcacgtccgaatctagtgttaactcatggtaaagggtcatatatatatgatttagaagatcgtaaatatattgatttcacatctggtattgctgttacttgtttaggacattcttatgaacccatcacgcaattaattaaagatcaaagtgaaaaattgattcattgttcaaatttatattataatttacctgctggagaattatccaataaattaattgttaaaacaaaagaatttgatgggatgaaagatgctagtcgagtatttttatgtaattctggtactgaagctaatgaagcagcattgaaatttgccccgtaa

SEQ ID NO: 6086 - DNA, 1383 bp, Candida albicans
atgacatctagatatagagtagaatatgcattaaagagtcatcgtcgtgatgaatttattgaatggatcaagggattattagccacaccatttgttttgcatgctgatgattctcatgctgatgctcaaatcgtggccgaaaattgtcaagctagatattatgaaatctttaaagatgtcgaaagtttagtgaaacaaacgatttttttggatgaattaaatgaacttgatcctaagaagaaatcaattagtcgattacgaactttagtaccgtcattagggaagttctttaccgaattacctttagctgatgcatttttattagaagatgaacgaagagcgatttccaaaagaagattagttagtccttcgttcaatgatgtgagaatgatacttaatacagcacaaattatggcccttaccaatatctataaacaaactgaaaacaacatcaacggcataagtggcaagaaccaacaacagcaacaacaaaagttgaagttgattacatttgatggtgatgtgacattatatgaagatgggaaatcattagatgaaaatagtgaagttgttcaaagactagttaaattattatcattaggattatatgttggtgttgttactgctgcagggtaccctcgtcaatctggagctgaaaaatattatgaacgattgaagggattaattgatcatttaaatagcaatcactgtactttgaaaacatatcaaaaagagaatttattagtcatgggagctgaatcgaattatttattccgatataataatgaaatgaaaggtttaaaattcattgatgatgaagaatggtttttaccacaagtgaaaaattggaatattggtaaaatcaattatattatggatactctttataaacatttgatttatttaagaaataatttcaatttagaagattcaactaccatcattaaaaaggaaagatctgttgggattatacctaattcaggatgtcgcatcttacgtgaacaattggaagaaatggtattatcttgttcaagaaaattaaatactattctaacgtcatcgtcaaattttgccgattccactgaagctctttgtgttgatgatattaaagtttgtgcctttaatggtggtagtgatgtttgggtagatattggtgataaagccttaggggtagaatcacttcaaaaatacatttgtcatgacgaaacagttgatcatgtttgtccaattggtaaatcggaaagtttacatattggtgatcaatttgctagtttgggtgctaatgattttaaagccagattaagtgcttgcacagtatggattgctagtcctagagaaaccgtagccattttagacgatttaattgatttcatagaaggttag

SEQ ID NO: 6087 - DNA, 1752 bp, Candida albicans
atgttgtcttttaaatcattattagctgctgcagttgtagcatcatcagctttggccagtgcctctaatcaagttgctctttactggggtcaaaatggtgctggtggtcaagaaagattggcacaatactgtcaagaaactgacgttgacattgttttattgtcattcttgaatttgtttccagatccattgaacgttaattttgccaaccaatgtggtaacacttttgaatctggtttgttacactgttctcaaattggtgctgacatcaaaacttgtcaatctttaggtaaaaccgtgttgttatctttaggtggtggtgttggtgactatggtttcagcgatgttgcttctgccactaaattcgcagacaccttgtggaacaaattcggtgctggtgaagatccagaaagaccatttgatgacgctgttgttgatggtttcgattttgacattgaacacggtggtgctactgggtaccctgaattggctactgccttaagaggcaagttcgccaaagacacttccaaaaactatttcttatctgctgctccacaatgtccataccctgatgcatctcttggtgatttattatccaaagtcccacttgattttgcattcatccaattctacaacaactattgttcaatcaatggccaattcaactatgatacctggtccaaatttgctgactctgctccaaacaaaaacatcaaattatttgttggtgttcctgctactagtaatattgctggttacgttgacaccagtaaattatcctcagctattgaagaaatcaaatgtgactcacactttgctggtgtctccctttgggatgcttctggggcttggttgaacaccgatgagaaaggtgaaaactttgttgtccaagtcaagaatgttttaaaccaaaatgcttgtgttgccccatcttcttctgctactacacaatctaccactactacttcctctgctgttacccaatctaccaccactacttctgctgctattacccaatctgccaccactacttctgctgctgttaccactaaatctaaccagattgtcacttcatcttcctcctcctcttcttcaatcttctacggtaactcaacaaccgaatcttcaactggaattgctactggtaccgttctcccaactggttctaacgaaaatgctgccaccactggttcaggttctaacaccaaacttgccatttcaaccgtcactgatgtccaaaaaactgttatcaccattacctcatgttctgaacacaaatgtgttgccactccagttactactggtgttgttgtcgtaactgacatcgatactgtttacaccacctattgtcctttgactaatagtcaagtgtatgttccagttcaaactgttgtatgcaccgaagaaacatgtgttcctagcccaacctcaactgctcaaaaaccaaaagccagtactaccattaaaggtgttgaaaagggccaaaccacttcctaccctgttgttggtaccactgaaggtgttaaaaagattgtaaccacttcagctcaaactgttggttctagcaccaaatacgtcaccattgaactcacttcaactattaccccagttacatacccaacatctgttgcttctaatggtactaacaccactgttccagtattcacttttgaaggtggtgctgcagttgcaaactctttgaatagtgtttggtttcctgttccattcttattggctgcctttgccttctaa

SEQ ID NO: 6088 - DNA, 2493 bp, Candida albicans
atggatgttgatttagataaacgaaccaaagtctccagagcttgtgattattgcaaaaagagaaaattcaaatgttcaggagtgtcgccttgtgaattatgcacaaaaaagggaatccaatgtgagtttaatattgttgatagacgtacaatacgacgcaagaataagaaaagaacaatacgaaataaacccgcaactgcaacaagctcaactaccagcaaaatcaaaaaggatgagaatcaaattgataaaactacattgaagatgttaactagaaattcaaaagttccagttcaacttcaaccattgttgtccttcccgttacacaaattagacaataaacaaaatgaagaggaaaagcatacacaacaaagcccacctgctgctgatgatacaccagacgatgaaagaaaagacaaggacagaaaaatcgacaagaaaacccatccagatcctccaaaaaatgaaagggcccctcctaaagttttatacgattctgaaggtaatttaagatatgtgggggaaagttcaccgttgtcctttcttttcgaatgtcggaacatttttttggatagaataggggaatcagatttcacgtcagagagcgattcattagaagttattgacgagccagatgaatcaacagaaatagtccaagttgcattaccaagtcgacaattactaaatgagattgttagaatattttacatgaacatacaacaagctacctactttgtcaatgttgaatattttaaagagaatagcattaaccccgtttatgaaaactatagcgggtgtgacccagaaaagattgctctagtaaatttggtaattgccataggactactacacgcggaagcaactaacgatccagttttgagtcaattacagtcaccaacaatgcggtcatcagcatattttgaatttgggttttatttgaccaaaatgaatatgaataaaggaaaattatggctaacggaagcattctctttagcatattgttactaccaagcaaaacaacaacgaaataccgcatggttaatgttgggaatggcaattcgaaatgcacaagcattaggtttaaatcgaaagtttatcaacgaatctttcaaagatcgtagttatattgttcatcggagaagattattcaagactttgtacattttagaccggatcacgtcgatactattggggcgaccattaataattgatgattatgactgggatgattttgacagcgaggacgtttacgacagagatttagatggcaacctaataaaggatacacgatttgagtgcatgatacaagcatgcaaaatatccaaactattagggaaagttgttagaaattattattcagatggaataattaatccttataaggctgaaaaattggcaatagaattaaagttgtggtcacttagcttgccggagccacttcaaattgataagattttcaacccaagcaaccctccaagcaaaattgcagaaccgtggattgatcataaggtcaccttgttgcttttacatttatcacaattatatgcgattgtgttgctttctcgacccttctttatgtaccttatttttgacaagaaaaagaaacggaaaattttaaagagaccaaaaactagaccagaagtggccatgcacaatttttgcaaagctacagcaaaatcatcagcattgataatacaactagtggaaaattacatcaatactatacgcattaccagcgggagagctgagctgcatggtctaacacatacatgttttatggcaacattgatcattggattatcactcttgtacctcgaggataacggatatactttgaaggatggatattcatcatgcaaacaaatgagctatttgaattcagctaaaaagatttttgaatactacagccaaacaaatccaatatcatctagattttataatattgtcgaacaaatgcagcttgcgttaatgaataaatttaatcttgatatggatggcaatagaataaatataaagaagcaaccacaacagaaacatgaaaatggggccagttcaacaactacaaatgaaacaaccattcctactgaaagctttggcgttggaactacagatattccatttaacgaagattatgacaattttattgacaattttggtaacttgttgccaacaaccaccaatcagcaacattcgacaaacaataacatgccattctttatgacagcacaaccatatcagaatactcccagcgcgtattcaaatgtctcagaagagcttgggaatcaccaacagcaacaagcttacccacaacaatcctcacaattaccggaccatgtacaacaaaaccaatatttatctcagtttctgcctactctagactccaacaatctagtttctggtcatacctcattggggtctaaaaatcaatctgaatctttagatgcttttatgtataatgttggtttgaacgatatattatataacaccaaatag

SEQ ID NO: 6089 - DNA, 1686 bp, Candida albicans
atgtcagataacactactttagacaatatcagtgtcaactccgaaaaagtcgtcgactacaccattcaccatgacgaccgcaaagaactagaaagattagtctcccacaacaagggggtggaaaagatcgtctccgagttagctgaaggtgctggtcagttagggccattggaacagccatacgatattcacaaagtcgagactcacccagatccacacaccgactacaacgacgccgacccttggaagtaccccattgacaaagaaacaaaattgcgtttagtggactggaccgaaggagacaaacacaaccccaaaaactttggtaagggattcaaatggttgtgcacggtcttgttagggatgatttgttttgttgtggctttaggttcagctatcgttactggggatttagaaagaccagctgcagatttcggcgtatcagaggaagttatcattttggcttcagttactatgtttgttattggttttggtgtagggccattggtgtttgccccaatgtctgaagaggtgggcagaaaacctatttatgtggtcaccttatttgttgcggtggtgtttattgtcccttgtggtgccgcccaaaacatcgctaccttgcttatatgtcgtttgattgacggtacagcctttagtgcaccaatgacattgattggtgggtcgttggcagatatctgggaagggccagaaagaggtacagccatggcagtgttctccgctgctccgttcttgggacctgtgtgcggtccaattttcggtgggttgttgtgtgactatgccccaacatggagatgggtatactggacgtttttgatcgttgcagggtttttctatgttgtgtttattgttgtggttccagaaacccaccacggaatattgttgaaaaagagggccaaaaagttgagaaaggatactggcgactctcgctatagatcgttcaacgaattgcaaatcagaacttttgcccaagtcgccaagacctccctcttgcgtccatttgtcttgctcagcgagcttattgtctttttggtcaccatgtacatgtcagtgttgtacggtttgctttacatgttctttttcgcttatcctatcgtctaccaagaaggcaaagggtggtcagcctcaaaaactggtgtcatgtttatccctattggtgtgggtgtcattgcttcgtcgttggcagcaccttttttcaacaaggactacaatagacgtgcccaggaatacagagacagaggagagttgcctccagctgaattgcgtttaattccgatgatgattgggtgttggtttgtccctgctggtcttttcgcctttgcctggtcttcataccaaagactttcgtgggccggtccgtgtttctcgggtttcgccgttgggttcgggttccttttgttatacaacccagcaaacaactatatcgtcgactcctaccaacactatgctgcatctgcattagccgctaaaacgtttgtcagatccatctggggtgcgtgtgtacccctcttcactatccagatgtaccacagattaggcgacgaatgggcaacctcccttatggcattcatctccttagcatgctgtgccatcccatatttgttctacattttcggtgcaagaattagaaccttttccaaatacgcatacgctccaaacatggattaa

SEQ ID NO: 6090 - DNA, 2439 bp, Candida albicans
atgacaaaggaacattcaattcggaacatttttaagaaggacaagacaccagataatggatcagcaacagcaacaccatcgtcttcacacactggtttgtcaaaacttttccataaggaaagcaaacccatcaccccaccaatgaaaagaacgccgtcggtctcatcgttgaagcgccgcaacaccaacccatcccaaacatctggcattagtctcaatcataatcatcaccatcatcaggattctcaaaaccataatgatgccaccactagtggtggcaatatccattcttcaacacctgtcaatagaagtagaagcaactctgataggctgggccacgttccaccaacaggaagaaaagtgctctcaaaagcagaaacatttacccatttacaacaattggacactagaaatgcagccaaaaatcaattgagaaaccaccgaattccatcaaatcatttgagctcaccgcttagtgcagccccacattcagataaaattgtatataatccatatggattaaataaaactgcaacccaagaacgtcctaaaaataccagtttctatttatctggggttaatgatggagaaagagtgttatcgaacccagtagccagtcctaatgactacttaccagcggagttgcaacaacaacatgtcaatttgttagaggattttgaaattgacgttggcaccaagaaattgggtgatggtggatcttctgatgttcgtatcataaactcatgtcatcataaaaaagatttgtatgcattgaaaaaattcactttgttgtcaaaagagacagatgaggatttctataaaagagtactggaggagtataagattcatagaaaagctgccatctcaagacacgtggttgatgcttttgccattttgagaattcaatcacaatctaatttaaccagaggttggggtatggtaatggagttttgtggtggtggtgacttgttttcagttattgttaaacccggttggaagtctactccccttgcagaaaaatattgtcttttcaaacaaatagcttatggtgttaaatttcttcatgaccacgatatagtgcatcgtgatttgaaaccagagaatgttttacttgacgctaacgggttggccaaattatgtgattttggtgtcagtgaatttggtcacgaagtaccggaggatttctcaagtcctgttaaattatcgacagcatatgttggttctcccccttatgcaccaccagaagtcatgttattgaaagaaaaatcaagtacagaaataaaagcttttgcctacgacccattcaaaatggattgttgggggttgggtatgttgttgttctgtttggtttatggtggtgtgccatttcaacaatcaagtcccaatgaccacgccttccgcgattacaagtttagtcacaagagattttgcaccgatcatcatacttttaaatctaatcaagggtatcctagaggtcctggtagtgaattcaaattggctgctaaatttgaaaataatggtgcttccagagttgcttggaaattatgtgacccttcagaaaacacccgttatacaatggatatgttgtttgacgacccttggttccaatcagtggaaatgtgtatttatgagagcccagatcaagaagtgaatccatttgtgttgcctgggactggtgaaaatattgatacacactcagtctcagggtattcatcagtcaacaattcacaagcgccatctagaagaggtacattcacatctcgtcctgttggaagtggtgctgggagcggatacaatagtcatgatgaaagtagcaatggtctcagctcaagcttcagaagcatgctagatttgaaggatattccacagaaaataacaaaaactgatgagccattaccaagtaattcatctgtgcattccaatgacagttcatcagcaagagcaaaatcaaaactcgaccacccatcttcgccaggatctctattatcacctagcactccagcattacaatcaatcccagctgatcgtgtggcgcaaactacatctccaattaatgcaagtctaccagccgtggaagaaagtgacattgagcacgaatcagaatcagaaatccaaggcgatgaaacagagagtctgggtctacaggttttaccacctatagacgatgttgttgcagcgtctccttcctcattgactcatgaaccacaagagcaagtcctagattctgttgaatcttgtattagcttaccaccaaatagagatcaagcatttgctggtaaagatggagagatgtgttctttagttgacttgaaaccagcagctttgaaaagtgctacagatttgcaattgggtgctgatggtatgtgcaatttgggatataaaataaaaaagcatcaccatactgaagtaagtaacgtttctaactcaagccgcaggtaa

SEQ ID NO: 6091 - DNA, 2115 bp, Candida albicans
atgtcaactactcaagattcgaaaaaaacaaccggcacttacaaacgttcaagagtcagtagaggaggtaaacaacaaaacactgcatttcgtggcagtggaggagcagaaccaaggaaaggatataagaaaaattccaactttgatgaaaattcaccatccatcaccaccaccaccaccatcaaacaacaaattgaagaaattcctgaagatgaacaatgtataatatgtgccgaacggatcaaatatgctgcattaacaccatgtaatcatacaacgtgtcataaatgtacattcagacaacgtagtttatatgaaagaaacacatgtctaatatgtcgaagtgaaaatgataaaattatcatcactgaattgatcgataaagattatgatgaaattagtgccgaccaaatcactggatttgatgaaaaatatagaattgaattcactcaagattatgttcaaaaagatacattagcattattagagaatacttgttctatatgtcgtcaacaacaaactttcccagaatttaaacaattaatagatcatgctaaagaaattcatggcaaatattattgtttaatttgttctaaattcaaaaaagctttcataccagaattaccattatacagttataaacaattacaaagacatcaaagtgaaggtgatggaaatggaaatggaactggaactggaaatgacacagaaacagggttcaaaggtcatccagaatgtaaacattgtcatggtaaaaggttttattcagaagatgaattaaatgttcatattagagatcgtcatgaacgttgtcatatatgtgatcaatctaatcctaagaccgccgattattataaaaattatgatactttatatattcatttcacaaaagctcattatgtttgtagtgttgccagttgtattgaaaaaagatttgtggtatttagagatgatttagatttaacggctcatatgttgaaagaacatggtggtattacaggaagtaataatcgagtgattattggttcaaattcccatcatcatttttcacaattatcaacttttaatgaagggaattcacgtcgttctaataatgatagatggatgggtgaagatgatgatatattacaacaatcaccagaaattaaacggaaaagatttgaggaaagagctaaacattatttaaattataatcaaaccaaagttgaagaatttcaatctttaaataataattttaaaaataaaaatatcaatgctaaggaattattatcaatttatcaacgggatttatttattcatcaaactcaagaagaattgaatattttgattaaagaatttctggaatttttccccccaaattcagatttacataaagatttaatttctgtaatcaaagataatgttcttgaggttgataatacttctcttccacgtgaactgttcccagtattaggaggtttgaaaagtaatggtaatattaatatgaattcaaattgggttaataataataataataataatacaactcgtcgtaccaattcaccatcaactattaatgaaaaattcccggctttagctaaaccaacgaaaaagaattttgtgaatcctaatagtcaacccattagatataccactattttaaaaccacaaccgaaaaagaaagcaattttgatgaatatatctcaaacatcaaatagtgattataccccaaattatctaaacaatatcaataatagaacctcgtcatcatcatcatcatcaccatcaatgccaatattaggcaatggcagtagtagtggtgcaggaggaggaggaggaggaggatttactagtagtggcagttcctcatttgcatcatctagaaacagttcaagtacagcattagatgataagaaatttccaacattacagaaaaaaaaacaaattaaaaaagtgataataccaagagttaatgaagtgaaagttgctgatccaaattcatggggtaaaaaacaatctcaaccaagtatcaccccaaatattaataatgatttggatggtattgaaataattgataaaagaaaacaaaaaatgaaacggaaacaagagaaattgttattcagtaatgcaatctaa

SEQ ID NO: 6092 - DNA, 2604 bp, Candida albicans
atgatcattcgaacattgaggctgcaattgcgattgccaaaaccagtttacatatccccgccatgtcggtactactcaactgatctagagaaattgaaaaaggaatctgacaccaccgagtccgataactcggcatctgccacaggggttattgataaaacacacaacgaagtgttgttgtattacgaccacatatacccatttacaacatccagaaatgttgttaaacagtatttgtctcgatttagtttgccctggagcaccgcctatgacgatgagaaattgaaacagaaagtatgggacttgtcttcgccattggaaacaactgccaaaatcactgagtttgtcccgctaaggagagattgtggggcgtttgtcaaattcaagtatccaccagaagtccctgccaccaaattcattgaagaaatacgagagaacgttgagaaaaatgaacaagaaagagtaaatagcaacatactcacaagactctaccaccagatctggcgaaatgtgccaaaggtgtactccgtaaaaggtacaccatggattgaagacttgcgccggttccccagtcccaaactctcagtcaaattcgaaggtgatccgttgaccgaagaagaattgtatgtgttgttccgtcgatacggcttgattaatgagattgaacctggtgccactgaagcgtttatatatttccatagcacgagagcggcaatcagtgctaaacattgtatcacaggcatggtgttgaatgggggcaagaccacgcttcacattcaatttgttgccattaagagatcgaatttcttggttctgttgatctcgaaccacactaagattgccatcccagtgttgattgcgcttttggccacatttgctgtgttgatttttgatcctattcgagaatggtttattgagtacaagattctccacaacaggaaatcgtttgaccagtttaaggagagcagatggttcaagtatctctacattccatacagaaccatcactggatgggtgtatagtagttacgactacattgacagtcaaatccaggaggttaccgggctgagttgctctgaggaggatgacagcagcaacggctcaaacattgttgatgggcaatcggttcgtgacctcaagaatgaaagcaacatgttttggatagaaaggtacgaaaagtcaaagcaactccagttatggattatggagaacgccaatacatttatcattgtcaaggggccccaagggtctggtaaagaggagtttgtgttagagcacagtttggggtcagacgaacggttaaataagaaagttttggtgcttgagtgtgaccagttgggcaaagcacggtcagacaacaatttgataaacacgactgcatcgcagttggggtatttcccagttttcacatggacaaacacggtgtcacgttttgttgatttgggagttcagggattaaccggacagaaatcaggtttaagcgagagcaaggagacgcaaatcaagaacatgtttctgttggcgacccaagccattcggaaaatcacaaccaatgagtacaacaaatatgtcaagagtgttgagagaagaaacaagagattgaaggacgatgagaaaatcgaagtcctcaaagaagaacaattcttgcaacagcaccccgaagctaaaccaatcattgtgttgaacaagtacagccgtcgtgcagatgtgctgctgaatgattttattcctccattagttgcagattgggcgtctgggttggtgcagaacaacacggcacatgtgatatttttgacagcagacgttgggtcgctccagctcttgaatgatgccttgcccaaccaggtgttcaaggacatttcactttccgatgcctccatgtccagctcaagacagtatgtctgtgatgtacttaaggtcaaagatactagcactttggacgaatgccttgagcctttgggaggtagaatgttggacttgcagtcgtttatcagacgtatcaagtcaggagaaagcccacaacaggcaatcaacgagatgatttcccaggctgctgagttgataaacacatttttcttgaacagtcatcacaaatttggtgctggtgatagcaactgggatccatcgcaggtgtggctcattatgaagttgttgtctgaatgtgacaccattaattatagtgagttggtgaaactgccattgttcaaagtatcgaaggaaacgttagagattttgacgacattagaaaagtacgatttgatatctttgaagcgtgataagggggtgttggataagatatctacgggtagaccattgttcaaggcagcgtttgccaatatcattagtgatttgcgaatttggaagttgtatgagactgagtatattggacggttgatatcgcttgaggcagccaagattcagaaattggaagaggaattggagaagatctacaagattggtaaagtagatggcagaatcgattatgtatcacagaaaattgaagcgtctaataaaaagattttggatttggaaaagcaagctgctgatgttgcaagctatacgggtaaaccagatggcaaatcatttttaggtatcaagttttga

SEQ ID NO: 6093 - DNA, 1275 bp, Candida albicans
atggcgggtacttcatttgaagagtacttctcaatccagacattcttaattgtctttagagaaacacttgaatctgctattatcatctcagtattgctttcatttgtgcatcaaacattcaatggcaacaccaaaaaatcaaaccgtgacactcgcaaccaaacttataacagcactgaaagttcaagttcattgatcccaactgaatctgatgaccttacttttgaaaaaaatgatgctaaactttgcagatatttacaattgcaaatatggattggtggattattaggacttttggtttgtctaataattggtgctatcattcttggtatattctatattattggtaatgatttgtggaccgtagctgaacattattgggaaggcacattttcaataattgccagtattatcatctcagtaatggggatcaaaatccttcgtgtgaataaaatgcaagaacaatggaaattgaagcttggcaaaatattgcaaagttcgggatacttgaataactcaaacaatcaacaatcttttaacaaagctggtcgtacatgggcaactagaattgaattatggtcagaaaaatacaatatgttcatattgccatttgtcactactttaagagaaggtttggaagcaatagctgtcatcggaggtatcggtatcaatgaaaatacttcagtgatggctcttgtaaatgctgctgtgttggccattatgctggggattttggtaggagctatattgtatcgttatggtaatactttgtcgttgaagatgtttttaatcacatcaacgtgtttcttatatttagttgcagctggtttgttctccaaaggagtttggaatttcgaattacagagatttattgataaatgtggtggattagatgtgagtgagactggtcacggtccagggtcatatgatatcgcaatatctgtttggcatgtcaattgctgcaatggagaaatgcaagaagacggagttttctggatggttttcactgctatcttaggatggacaaattctgctactattggtagtgttgttagttataatgtttattggattgttatcatattggtattctggtctttgatttatgaagaaaagaacggatttttacctttgattcctatttcctggcaattgaaaagaattcaaaagagaaagaacttgtaccaacctttagatgctcctgagattggtgtacacgaggaagttagagaaagtatggactcgttgaattcagaaacccctttacaaagatga

SEQ ID NO: 6094 - DNA, 2022 bp, Candida albicans
atgtctgaagaaatatctttatcattagaagagacaaataaactacgaatcaaggcagggttatcacctataccaacgacatcatcacaactgaatgaaaaagttagagaagtgatatctttatcaattgaagaaaccaataaattaagacaaaaaattggattacctttactacctacaacaacaacaacaaatatatcaagtgatagtaccgaatataagaattatgaagattatgaacgggaacgattacaaaatttgaagaataatcaattaattgaaagaataaataatgccaaatttaattccaataaacggaaatttctaactaatgaaaccataattgataatgctgaagatttggatactgatgattggttaaataatttaggtgaatctactgaatctagtaaacctcacaagaaacagaaaacaacgattgttaaatcaaaccaaaatgatacaggtccaactaccactattattggtcatactactaaagaattacaatcactaggtaataatgaaatattaacattaaaagacactgatctaataaacgatgatgatgaagatggaacggggagtattttaatgaatcaagatttatctaataaggcaaaattgaaacgaaatttagcagaaaggaaagaagcagagaatattaaatttaatgggagacattatagaagaaataataaagaagaagaagaggaggaggaagaagaatttaatgatattgatgggttattaactaacaataaagtgataatgagtggatctactattgatttatcttcaaatactgctaaactaccaccaccaccaaatgataaaaagaagaatatgttggcaattactaatttatttgaagatcttgataatgacactttaagtaataataacaacatcaaatcaaatgttcctataaagatgaaaaaaatcaagacaaagaaagacaataacaagaagaagtcaaacaagttgaaattgttagatgatactataaaaccagttgaattactggtagagactaatattggtaatgatgatgatattgatgatattgaaaatcaattatctaatagtatatccaatttaagaactaaaaaattacaaactagattggaatttactccagaacaattagctgaagaaatatctgctaataaacgatgggaatttgaaaggaaattagaacaagaaaacttgaaaaacaacaacaataataataatgtatataatgatacaataggatttttaaacaatttggagactaatattttgagtgaatcaggtgaagttgaagttactgcaaacatcaatgaagaaagtgctgatgatgatgatgaggatgatgttaaacaacaggaagtagaatcgaaacagactaatcctggagtgtattctattgttgaagagaaacaaaaagaagatgaagcaccaaaattcagtggtggattagctgaaactttaaaatttttgaaatctcgtaatatattagaccctgaatcaataacaaccaccaatgaagaattaagacaacaagaattggctcgagaagaagcaatcaaaaaatccgaattattaaaaatgaaaatctcaattgaagaaagaatccttaaagaagaattaagtaaagataaatcatatattcgtatgcctaaaattgaacgatcaggatattttgaaaaattactagacacaagattaaaacaaaaaggtataatcattgataataatacaggtactactactaagaagacgaacctggggatggtacaaaataatttgacaagttataatccaaaagttgaattaactgataaagatgaattaggtaatgtcttaaatactaaacaagcttataaacaattatctcataaatatcatggaacgggtttagataaaaataaaaagaaacaagaacaattgaagaagcagcagcagcagcaaaggggtagtaaatccaccaatacttcaacaacatcaacaacggttaccgaaagagttattaactag

SEQ ID NO: 6095 - DNA, 984 bp, Candida albicans
atgttgagtagattgggatttagcacaggtatacgatccatttacagtgttctggaccaaccatcctttgtttctgaaccatgggctatttatcctgctaaacacaagaccaatggaaaaattgtttcagttttcatttttgacaaatcaaaatttgaaacccaagttagtaggttgcatactacttcttcgagtgtgaaaaatcctaaagtagtgataagtgaatgctatgaattgataaaatatgaagttagtcaattaagtaaattgaaacatccacaattattacaagtttatgaagtattagaagaaaccaaatcgaaattcttatttgttactgaacctgtgattgataatttagttacggtgaatccaaaagatttagatgatttatctattcaaaagggacttttacaaatttctaaaggattacagtttttacatagttatgggtcaataatccatttgaatttacaaccttcatcagtttatattaataatcaaggggattggaaattaggtgggttcaaattcttacaaaacttgaatgaaatttcaccacaagaaagagaaaacttctatatattgaataatatgtcagtggtaccatttgcaaattttaatttaaatttcacagcaccagaattgattattgattctcatacaaaattggatttcgccaatgatatatggtcattaggtcaattaatttattatttatataatcatcatgatttattgatcaattgttttgatgccaatagtatttctgattataaacaagaatttcggaaatttgaacaaaaattctataatcataaaccaacagaattgaaatatgtattaaaagatattcctgacaaattatatcctttatatccacaaatcttggcaagatatcctcatgatagaatcacattggaccaatttatggattcagagtttttcaatgagcagcattataaaggcaatgtggtttattga

SEQ ID NO: 6096 - DNA, 993 bp, Candida albicans
atgacaaggcagtccttattaacacccacaaaaactgattattcagatgcccatggaaattcagaaggtgctcaacaatataaggaaaagtggataaaaatcaagcatcaaagagatgagaatggaaatttaaagtatccttgggattttgaagttgtccatggttttttcgtccagagcgatatgtccacagacgattttgggtttaatcatacttttcaaaacatgggtagaaaaaaatcttgggaagacataaaagccgaattgatacaactaaataatgaagctccagataatgttcagtataagctaatttttttagcacgacacgggcattctacacaaacacagattgttgagttggaagggttgcatttatggcatgaaaagaattgtaaactcactggtaatgatcagtttacctgggcaccagattcggaattaaccgagattggattggaacaggccaaggaaaacagagaattttggaaatcagagctattgttaggagcccccattcctagtaaattccatacttcgccattacaaagagcgtgcagcacattagttataacttggcatgatctaaaaccagtagagacgaggccaatagtgtgtgaaaaattgagagagaaaattgggaaaaacctaagtgacaaacgttctacgagatctgaaattcacgaaaagttcggtgacacttatgggtttataacagacggcttagaagaggaagatatatattttactgagacaagagaaaccatgccagaacagtctctacgcctaaacggatatttacaagatttgtttgaacaagactgcaaatcgggcaaagttgacaaaaaactggcagttgataacattttcatcagcaccacgtcacattctggcacaattagatctgttattaatgtggtcggtcataggaattttacagtgtccacgggcggtatgcttcctatagtagttaaggctaccagacggaattaa

SEQ ID NO: 6097 - DNA, 1179 bp, Candida albicans
atgacaatctccaattcaaatttattcaaaccaattaaagtcggcaataaaactatcaagaatagaattgctcatttgccaaccactagaaatcgtgctactgatgatcatgtacccactgatttaatgaaaaaatactacacagaccgtgctaaaagtggatctttattaatcaccgaagccactttaatctcattagatcaaggtgtttaccctaatgttcctggtatgtggaataaacaacaaaaggatgcttggaaagaaatcaccgactcagttcattctattggtggcaccatagctatccagttatgggctttaggtagagttggtaatgccaaattgttgaaagatgaaggattaccattaactggagtcagtcctatttatgaacacgaaaaggctgaacaagatgcaattgatgcaggcaacccaattcaagaattgactcaagatcaaatcaaagatattgtttataatcagtttgccaacgcagtcaaattagctgatgaagcaggttttgattttattgaattgcacggtgccaatagttatttgtttgagcaattcattcatcctggaaccaataagagaactgataaatacgggggatcaattgaaaatagagccagatttttatttgaagttgttgatcatgtatccacaattgttgatcctgctaaattggcaatcagattatcacctttaaacaattttcaggttccatttgtaaacccagaaggacaagaagattattcttacatcgttgaaggtttacagaagagagcagatgaaggtaaaggtcttgcattcattgatgttgttgaaggacgattcacatctgatggaggtactgaaggttgtaatgtagattttgttggtgaaatttggaaaggtccattgttaaaaggaggcaattatacttatgatagaaagaacgagtggaaaacaattgaaaacgatgccaatgcagatgatagaacgttggttggctttggcagatatttcattgctaacccagatttacctgctagaatccaaaagggcaatgaattgaatgattatgatagatcaacattctacaatactgatgattatggttataatacctatccattttatggagaggaaaataaggctgaccctaatattaaagtattaggcgtggctttagcttag

SEQ ID NO: 6098 - DNA, 1641 bp, Candida albicans
atgaaacaacaagacgatttagaaaaatatcaagacattgatactaccaacaatgacattaaaccaataatttcttttactaaagaagatattgaagatggtaagaaccctaagaatcatcacgttataaccacaatcacatcttctgatggtaaaaaaatcaatattaccaatgatgttgatcaagccatggaagcagtattatcaaatgataatgaaccgccaattaactttgatgatatatcttcaactgaatggaagaaattattattaaaaattgatttatatttaatccccattatgtgtttattatattgtttccaattcatggataaaatgaccactagttatgcttccattttaggattacgtcaagaattaaaaatggtaggggatatgtatagttggacggggacatcattttatttaggatatcttgtatttgaattcccagcatcaatgttattacaacgattccctgtgactaaaacagtatcaattttcattattttatggggggttatattatgtttacattctgtacctaatcaatatggtggatttattacattaagaactttattaggaatgttagaactggcagtgacaccagcattcacgattattacatcacaatggtataaaaaagaggaacaatttttaagaacggcattttggtttggatctaatggaatgggtaatattattggtctggctattgcttatggattatatcaaaatcaaatcaattatagtattgatgcttggaaattgattttcatcgtcaccggttgtttaacaatatttgttgggatgattataatggttcatattcctgatactcccaccaaggcatggtttttaaatgataaagagaaaagaatggtggttgaaagaattagaactaatcaacaaggttttggtaatactcatttcaaaaagcatcaatttattgaagcagttatggatcatagaacttggttatttataatttattcaatttctagtaatttacctaatggggggttaactagttttctggcaattttattaaatggagattttggttataatttaactgaatcattattaatgcaaatgccacctggtgcaattgctgttgttggatgtattatccttgcttattgtgggaaattcacttcatcaagattaattatggggatgatatcacaaattgttgttattatatgtaattgtttatttacatttgctaaaaatgataaagcaagattagctggtctttatattagtgctgtgggtcccgtaggtttcatttgttgtatatcttgtgtttcttcaaatgttgctggtcatactaaaaaaatcaccgctaatgccatgtttttaattgcttattgtgttggtaatcttgttggtccacaaacttttattgaatctcaagctccaaattatgttggtgctaaaattgccattgtcatttgttcttgtgtttcatttattactttggtattgatttatttatcttattactgggataataaatcaagagataataaagcacgtaatagtgaagatgctgatttaatgaatcatattgaaaattatgaatttgctgatttgactgataaagaaaatttgaattttagatatagtctctag

SEQ ID NO: 6099 - DNA, 2556 bp, Candida albicans
atggcacaagttatttggaattcagacattgatgtttacaataaagatgttataccaatcaatatagctaaaaatattgccaaatatttaccgattcaagatttattatcattttcacaagtttctaagaattgccatttagcagttactgatcctaaattatgggtttcaatgttgaaaggaatgggggtatggcaagaagctaaacaattgactaaacaagatataaaatctaatcaaaaaagtaatacccctgggggctatctaaacgatccattaacatgtatggattatatttatcgatctaataaaaatgctaaatatcaagtgattaaaatttataaatgtttacatgaattttataatgatttgttaattcaacagaattataatcggttaaaaatttttaaacggttccaaacacctcaagatcaagttaaaatattgaaaaatttacggaaatttaacaaaattgattatattgaatcttcaagaattatcgctaatgaaaaaatcatccaattatttgaattattagaaaatgctttattacgtgaattagaaattcattttgatattgaagattatgaaaagacaaaacaatttgtgaatattttaattgatttaaataacaacaacaacaataatcaacaaattttaattgatttcttcttacagaaaagtatttttgatgaaaatatagaattatttaatttagagaattatgatgaaacgaaatatttcataaccaaagaaggcacagaatcggagggcacagaaccggagaaactgatcaataatgagaacatcgatgagttgataattaatattgccaaagtatttaatcaacaaagtcatataattgatttgatattccctcaatcaataccaatgatgtataaagttagtgaagaattaatttccaatcaattaagtgaactattaatgttattaattgaatcactgaaaaaatttggattgtactcagttttggtacccatgatttacgaaaaattagccatgagtttatttattgataatttaaacccctgtgagaatgttggtgaaagtttccaccaattaataattgaattaatcgatatgctgtttgaatcatttgccgctgaatatatgagagaagaagttggttcatttaaaagtaacaccaaaaggaaattacttgattgggaacaagtgatatctaaaagagaacaagaaacttcacaaaaaattcttgatcgagttaagattgaaaccaaaaatgattttttaactagtttcaaaaatgttttcacaataaattcatcgaaaagtaaacacaaccatggtggtactaataattcacaatctcaagacaatgtacaagaagaggtagaagtagaagcatattcagaaattcaagccaaggcgaaaatcttgtccgaaaatattaaatcattagataaaatattcaatccagaattgacagttgaaattttaaatgattgtcgaatatctattcatcggttattgaaatttcaaaatttttcaatagcatcagtaagacaagatattttccaatcgattcaacattgctttgttgaattaattgaattgataaacctggatcatttattgcctgggtttgatcgtgctttgacttatttacaaacatataaccctaaatcaccaacatataccaaatcacataatgaaagtttcgatcaaccattgattttatttttcaatttaattaatatggccgatattattatacaaatgattgatattttttataaacaagaaattttaattactcaacagaatgaaaattctattttaaatccaagtttacaaaataagaagaaattagaagcaatagttgataaatatgttgctgatggattaaatataggaattgaaattttagtagatcaagtggaaacaatttatcaacaaaatctatccgataaagattattaccctgattttaacattcaacaacagaactcacaacaacaacaacaacaacaacaacaaacagattcacaaacgataccaagttctgcattgtcacaaactagtgacttatctaattttggacctacagaagcagcaatcaaagcaacggaagtattagaacaaaatatgaatttattagttgatagtgctgacaaatcaattgttgatgtattccaacaagaaattgcagaaagatttttccaaattattgttaaatcattaaaattgaaaacaatttccgttatgggggctacaagattaattagtgatttgaatttatattttaaatttattaataataatgtcaaatccaataaacgattagtgttacctttatatcaagcattaatcaagattggtaatatctatttaatcagtggtgatgattctaaatcaattgggaaattagttagtgatttatcgaaatttaatggaattttcagtcaagaagaaatttatgaatttgttcaaagaagacaagattggccaattattaaaaaacatgttgaaaaagttatgtatgggtttggatttggtgattgtacgatcatgtaa

SEQ ID NO: 6100 - DNA, 1743 bp, Candida albicans
atgagtaaattgaaaacattaaatagacaattcatatccaatctagagactcataaggtgaccacagatgccaaaagaaatttgatcttatcaattttaaaatcaactactacaaaacgtgaagccaagaattacttaactaaataccaaaatcaatttgatttcaatgatgatttagattttaataaaagtattaaaatcaaaaatgaacaactgtcattaactaatagagattcacaacgagaattatttataaatagatttcttaatcaactgaatccatttataaatgtttatgataaagaagatgtaaaattacaaaaagtacctcttcgattggccattttcaaaatcaaattcacaaaaataactattaaacaatggaaaggtatagctgaaacttttaaaagattgataactttgggtatttcaccaattataatgttagattacgatcatttacctctggattcttataaaaataatgaactttacatgattaatcaaggtaacaaaatgctcaattatttgggacatcctgaagaagaaagcgatttgaaagtgacacttttacggtcattatttacgtcacataaaggggtaccaacattggatagtttagaactgatacttattccattgtatcaggggattatccccataattcaaccaattgtctataatgcagatctttcaaaacaagaatttcttgcctcagataaattattgttaggtttaagttcagcattgattgaaaaaagaactaatgatttgttatccattgagaaaatagttatgatagatcccattggaggaataccttctatagaaagacaccaaactagtcatgttttcataaacttgtcacaagaatattctgatattctttccgaattatttattggacatattgaacccaaatatcgtgacactcatgtcgataatttgaatactatgaacaatgttttatcatatataaatgaaaaatcaggtaatgatgaaactacaggcattattaccaccccggaaatcatgtcaataaatatcgatcaattgaatcctataatttacaatgtccttactgatagagccattatatcgtcttctttaccaagcaccaccaatagaactccacatttgtccactactattatcaagaaaggtgttgaagtacaaatatttgacgttgacaattatgacaaagacttgaccatgcaaaacttgtttgatgataaattggtgaacaaagagaaattgatcgagttattaaatgattcgtttggaaaaagtttagatgtatgtccctatttggatcgtataaacaagaacatagcgacagtggtaattgttggtgattacgatggagccgcaataattacttgggaatatagtaaaggcgaaaagattgcctatcttgataagtttgccatcgccaaaaagaatcaaggtttacctggcttagctgatgttatattcaaaatcatcttacaatctcatccatttgaattgatctggagatctcggaaaaacaatccagtaaacaaatggtattttgaaagatgttgtggatgtatgagtgcccctgattctcaatggaaaattttctatacgggtgaagtgtttgataagaagattgatcggtttaaacggaaaccacgccaccaaaatggtgtagtcgatattgatagaaaattacaacaatattccgaaatttgtgaaggaataacaccatcatttaaatag

SEQ ID NO: 6101 - DNA, 1320 bp, Candida albicans
atgtcattttcatttggatttacaaaagatgattttagtgattttagtgatgatgatgatgatgatgaattagaagaaagtaatacatatatcaaatcaaatcaatcatttttaaatggttcaaattcaataattcaacccctcaacgcattagattcattaattataacaccagaaaacaaaccaaaactacataatttagattcgatattatcaacattacaaggaattagaattagttttgataattataccacaccacaagggaatattatatatcgaagagaattatttgatgttaaacatcaattaatgattgaagaagaacaagaggaggaggaggaagaagggaataacattggagttcataaattattgattgatgaaaatcagaataataatgatttacaaaaaaatgtatatgaaggaggatttaaaagttgggaatgttcatatgataccgttgatgcattgaataaattgataaatggtagtgatagtgatagtgataataataataatagtttgttactgtcaaaatcaattttggaattgggttgtggtacagcattaccttcatgttttctattattgaaaaaattccaatcaataaaagaaagtaatcaactccaatcttcatcagactcagggttaagattgatattatcggattttaattatgatgtacttcgattagtcaccgtacccaatttattaattcattgggcttcaactatatcaattgaacaattacacgaattaacatcaacgacaaatgatgatggtggtggtggtgataaaattgagtcaagatttgttaatgatgaaatcttaattacgacaaaattaattgatcaatttaaaaatgatcttaataattataatattgaattacaatttatatcaggatcatggggtaatgaatttattaatttaccggctattaaagataaagatactaatggtattgatattgatgttataataagttcagaaacaatttattcacttgatactttacctattgttgctgaatctataaaaactattttccaacaatctagtagtaagagcattgctactagtaagaataataataataataataataataaattagctattattgctgctaagaatatatattttggagttggtggttcattaattgaatttttaaattattttaatcaaatcaccaagaatgataatgatgaccaccaaggccaagggtttaatgtttctgtggaagaaatcaatgattctcaattgaaaagatcattagtttatatagattatagaggaggttattcatcatag

SEQ ID NO: 6102 - DNA, 630 bp, Candida albicans
atggcaactactatagatccaactgattacgttgaagttgaaaatggtactttagcattttccgacccaaaacaacaagccaagtttgaactcggtgtgtgcatggcgatatacaaatgggaagaattgacaacagccgtggataatctctggggaggtcccaaatcggccgagaagagagattggatatctggtataatcattgacttgtttgctgaatctaaaattgtggatatacaactcattgaagaaacattgttgtacgctatggttgatgaatttgatacgcaaattgacaacgattccgcattggagataggaaacttgattgtaaagctatatagagatgcagcacaagagaaatatggtttgattgatgagatgtacgaaaaatggcaagcaaaacaaaacactaagaatttccacaaagtacatgttgaagatgatcctaataatcctgatgtaagcagtgacgaaaaagaagaagaagatgatgatggagaggaggaagaaatacaagatgacaacatgatggaaattgacgaaccagaacaaccacgccaacagaatgccccaattgttgacgacgatgggtttgagttggttcaaagcaaaggaaggagaagataa

SEQ ID NO: 6103 - DNA, 1860 bp, Candida albicans
atgagaagtttatcaattttttctttagttttcctttttttctcaacattaattactgctaaaacccatacatggtactataaaactggttgggtgaatgctaacccagatggtggatttgaaagaccaatgattgggtttaacgatagttggccgttacctactttaagagttaagaaaggtgacactgttaatttatatttgatcaatggtttcgatgacagaaatacttctttgcatttccacggtttattccagcacggtactaatcaaatggatggtccagaaatggttacacaatgtcctattccaccaggtgaaactttcttatacaattttactgttgatgatcaagttggttcttactggtaccacagtcatacctcaggtcaatatggtgatggtatgagaggtgtctttattattgaagatgacgatttcccatacgactacgatgaagaagtcattttaactttgggtgaacattaccacgatttctctgatgatttacacaagaatttcatgagtagatacaaccctactggtgctgaaccaattccactgaacattttattcaatgaaactagaaacaacacttggaaagttgaaccaggtaaaacttattttgttagaatcatcaacattggtagatttgtatctcaatatgtttggatggaagatcacgaattcactattgttgaagtcgatggtatttacgttgaaaaaaacactactgatttgatttatatcactgttgctcaaagatatggggttttgattactaccaagaattctactgataaaaactatgctttcatgaacagagttgatattgatatgttggatgttattcctgatgaattggaattgaacggtactaactacattgaatataactcaaaagctgacaaaccagaaccataccttttggattctattgatgattattttgatgacttttacttgaagcctttgagtaaagagaaattattagatgacgctgattatactattactgtcgatgtgcaaatggacaatttaggtaatggtgtcaattatgctttcttcaacaacattacctacacgacacctagagttccaactttgttgagtgttttgagtgcaggtgacgatgcttccaatgaattggtttatggtactaacaccaacagttttgttttgcaaagtggtgacgttgttgatattgtattgaacaatttggataccggtaaacatccattccatttgcacggtcacgtattccaattaattgaaagacacgaagaaattccagaaacagaagatccagttggttataatgcttctgaccatgccgattggccagaatacccaatgttgagagatactgtttatgttagacctcaatcttatattgttatgagattcaaagctgacaacccaggtgtttggctcttccattgccatattgaatggcatttggatcaagggttagcaatccaattgattgaagatcctcagggtattcaaaagaacactagtcaacatatcaccgacaaccataaacaaatttgtgaaaaagtcggtgtgtcatgggaaggtaatgccgccgccaacagtaaagactacttgaatttgaaaggtgaaaatgtccaacataagagattaccaactggtttcactgctagaggtattgttgccttggtattctcatgtattgccggtgtcttaggtttagccactattgcctactatggtatgaatgacattgccgatgttgaagaaagagttgctagagatttggatgtcgactttgatgaagaagataacgaaatcgtcaatgaaggatcttcttcttctggtagtaattctaaacattaa

SEQ ID NO: 6104 - DNA, 1392 bp, Candida albicans
atgctaatattaaagagattattaacaacttcttgtactttattagacacttctcctaaaaactattataaaattatagctccatcaacttttgaaactaaaaaatgcgaatcatataacgaaaagcactcgtcaaccacgactgaaattacagcaacatcaacagcaacagtagcagatacggttgaagacgagttgacaataacacacaaaacgaaacgaaaatttatatccacttataagcgttcaactcatccaacatcggtcccattatcgaaaatcttcagtaataacttccccttgagtataaacgaatcatttgaagattacaaatatcgtaacaatcctttgaaatttcaacatgatttattatccatattacctttttatcctactcccgatctacaggtaaagacgaaagaagggagatcatctgaagtattgaaagttgaaatcgatgacaagggaaactatataaatgaatttgtcatttatcctgaaaattacaatccacaagtaatgcccgatgacgaatatcatcatttaataatggtccatggatatggagctggacttggattttttttgaaaaattttgatgaaatttcaaatttccaacccaataatacccaaaacaacaaatatattgttcatgctattgatttattaggttatggatgtagttccagacccaatttttatcctcaaaatttagatcaagtggaaaattggtttcacgattcatttataacttggttacagaaaagaaatattcctagtgataaaactattgttatggctcattccatgggggcatatctcatggcaacattagccattaatcgaaatttaaaattttgttccaaattattaatggtatcaccaggagctataatcaaacatcaaacccctgttcaagtacctcgatattttgttaaattatgggaaagaaacatatcacctttcactattgttaggaaattaggtccattaggttctaaaatcgttagtggctggtcatcaagacgttttgataaattaactagacaagaaaaaaaattattacataaatattcttatggaattttccaaagtaaaggttctggtgaatatatgttgaattatttattagctcctggagctgatgctcgacatccattggttgatagagggatagatagaattacttgtgatgtttcttggtggtatggtaaagaagattggatggataaaaaaggtggacaaatatgtagtgctatcattaacaataagggggaattcaaaagtgatgttaaaataattgaggatagtggccatcatatttatcttgataatatcaaaaaattcaattccatggtacttgaagaaatgaatcagctaataaacaagtaa

SEQ ID NO: 6105 - DNA, 966 bp, Candida albicans
atgtcattcaatttctccaattttacaaaagatttaaaatcttttggtgataaaatctctactgaattcaataaggaggttgttccattagctcaaagaacttcaagattagttcaagaaaaaatggggaacatcaaacaagatgatatcagtcaattaccatctgaatacatagaattagcaaataaatgtaacaatattgaacaattatacaagaatgttttgaaaatcactactaattatgaaaatgaaagttatgattatccaaccaatgttcaagaaagttttacagaatttggtaagaacatcactactagagtttccaatgtagccaaagctactactactgctgaagctcaagcagcattgatcaatcctaatactggtgaattcaaagcacctaagactttatatcatgcattaagtagagccactgatgcatcaattttgactagtgataaatctcaagatccattaattaaaggattagatttatattcttcaaatttaaacaaaattgccaatgcgagattaggtcaagatcaattgattaaatctaaattcaataaacctttattgacaacattacgttcattaattagtcaatcaaataatattcaaaaaaaagttgaagataaaagaattgattatgatttaactagaagtaatttggccagttgtacaaatcctcaaaaggaaccaaaattaagagttgatatggaaaatgctgaagatgaatttgccaatactgtggaagatgcaattaatattatgcaaaatgttttagaaaatgctaaacctttggaagaattcttggaattaattaaagctcaattggcttatcataaattggctactgaattattggatggtatggttaaagattttgaagaattaattgatgaacaacataaattgagtggtagtgctactagtggcagagaatccggtgattttgacatttaa

SEQ ID NO: 6106 - DNA, 1635 bp, Candida albicans
atgtcacaatccccaactaacgttccaagatcctataattcagttttagaccttaaactcgcctcaccgacaaattctgcttctggtgccactggtggttggattgtccaaaaatttggtggtacttcagtaggtaaattccccgagaatatcgttgataacattgtcaaagtatattctcaaaccaatcgtgttgctgttgtatgttctgctagatcttcacaaacgaaaagtgaaggtaccactagtagattattacgcagtgctgatttggcagaaaacgataaggattatcaaccacttttaaatgccattgaagaagatcatgttaccaatgcagaacgtattcaactgaaagaaattaaacaagagttgattaaagacactaaacaagaaattgaacacgttagagaattattacatgcatgtcaaatcatcggtgaaattagtcctcgttcattggattcaattatggccgttggagaaaaattgtcttgtttgttcatgactgccttgatgaaagaccatggattgaatgctgtatatataaatttacaagatgtcattcctttgagttatgatttccaaaaagggtttgatgattcattttatcaatttttatcccaagaaattggtaaaagggttttacaatgtgataaagaaagagaagaagaagaagatgttattccagttttaactggttattttggtgttgtacccggtggactattaaatggtgttggtagaggttatactgacttatgtgctgctttagctgctgttgccttacaagctgatgaattacaaatttggaaagaagttgatggtattttcactgctgatcctcgtaaagtccctaatgcaagattattagatagtgttaccccagaggaagctgctgaattgacatattatggttctgaagtgattcacccatttactatggaacaagtcattagagccaaaattcctatcagaataaaaaatgtggaaaatccaactggtaagggaacaattatataccctgataatattggtagaagaggtgaagccactccacctcatcctccagctgcatttgaacaattggccatgagtagtttattacaaagaaaacgttcagccactgccatcactgctaaacaagacattgtggttataaatatccattccaacaaaaaaacattatcacatggatttttagctcatgttttcactacattggataaatataaacttgtggttgatttaatctcaacttcagaagttcatgtatcaatggcattactgatacaactggatcaagaatcacaattgaaacatgcattagttgatttacgtaaaatgggtactgttgatgttactaagaaaatgaccattgtttccttagtaggtaaacaaatggtgaatttcattggtattgctggtaatatgtttaaagtgctagctgatgaaaaaatcaatattgaaatgatatctcaaggagctaatgaaatcaatatttctgctgtcattaatgaaaaagataccattagagcattaaaatccattcatgctaaattattagaaggtggttcagcaattggcgattccctggctgtggatacacgtttggaagcattaaaactactgtag

SEQ ID NO: 6107 - DNA, 3792 bp, Candida albicans
atgagtgattatgaatcaggatcagacatagataactattatgaagcagatgaatttgacgattttattgaatacagtgataatgaagttgaacaagaaaaatcaaaaccaaccccaggccaaatagaagttgaggaaattgaagaacctgaagaagatagaataagaactttgactacaactttaaaaccaaatgagacacaagcccagaaattattaaaagcgcatatttctgttttagtatcagcccttggtggtcctgaccacacttcagatattcaaccaccgccttataaattgggccatgatgcacttgcgtgtcttaaagatattaaacgctggataagagctgttgatgaaaagaaaaacaattatgaggttgccttggcatgtgctgaaagtggattagtgacaaatgatttaattgtgattatgtgtcaatgggaagataaaatgcaaaagaaagagatcattaaaaacaaaactaccactgagaaaacgatgttggcgtgtcttgaattgttagtactattaacatggcctgttgagtttggtaaagatttatctgagagccaaaaattactttattccgaaattaaaaaagtgcatgtatcttataagaaacaaatattaatgtttaataatggacaactattaaaagctgctattagattagttttgccaactatagcaaagtcgaggatagaccgtgagcctagggacaaccaaattttgaaactagttttgtacctcataagaaatttattagctattgaacctgcaaacttgtcgatatctaacaagtcacgtaaaggtgctagtgtaactgcatctgatttaccactcggtgtcacacaagacgatatatcgatcaataacgtattgtctgtattcaagaaaaacaaggtattgatgttgcttttaaccatatcaggatcgctcggaactgaatttgatagagacatgtttggcgaaatatgtttggaaagcatttatctaataataaaggggttatcagcatctgaagttttggtgaaaaagaatttgggatctacacctgttgctgcgccttctcaaaatacggttcctgatgccatcaatgcctcacagccattgcaaccagtgacgactactgttggaatgcaattgcaagatttgttggccaccgagtccaagaaaaagaaaattcaaacacaaaatatagcttctagacatggtcgatttggatccttactttctatccgatcagccgactcgaattcttttgtcgtatcaggacaagaagcattaatcaacactgatagttctttagctaaattggacaagtctaagaaatggaaagatagaacctatttcaagtatgattccgatgaatacgtcaatacttccactcctgtttatcttaatttaactggacaagacattttgtacaattttgtggaacaatttttatcaggggggtgtttcaataatttgattgagtgtatgggatcaagattaaccagtcaaactgatttgaatatggtagatgagcttacacttgctagttattttttcactatttcatggtttttaagttaccaaagagaaagaattgggttggactcagaaaacaaggagttgaattatggatcagtgggtgctgcattgagtgaagtcaattttattttgatcattggatatttcagagattcgttttctgtgaaaaaatggaattctttgcatgtggcaatgatatgtttcaaggagttgttacaaatttccaattcagtgtttggtaaggaaatcactaaccagacaggcgaaggcgatgaaatctcacagcatgaaattgatcgagagttggcagaaggtattattagaaagctattttcatttaatgattttttgagtattattgttcaaatacctcagactgcggccaaacattctccagattatcttagagtctcggtttctgttgttcatattttattaaaggcttttgaaacttttgccaatgaagatgttcatttgtatattcaatcaaaacgtaaacaaagtaagagaaaccgtaagcgggtgaacaatttggataagtctactgaagataggttaagagatgtgatctatgcatcagatgaagaattagaccaatcgagtgccaaagaaataactcaagaacgtaaattagatttcaagaaaacagaagcaaggtttttccatcaagcgattgtatctacatatatcaactacttatcaagatatgaagatttatcaaaccaagaaatcaaaacgtgtctttcatattttcatcgattatttgtggtaagaaaagatttcactgggttgtatagattggatttcatgcaattgttacaaaagttgagaaattatttgcaacgaggaagtagtctacgtttacaagttgaagaatttatttattattttatgaaaaaattcaagactgcatttgaaagattccccatgcccattgaagtattatttcctcgatttgaagataacgagtgtaaggtttatctagctacaggagaagtatatgagaaggaagaaacgacatcaacatcacgttctccaagattagctaaagatttggaatttgtacgtgattttggtttagatgatcaaattaaaatcttggtgagtcagttgcatgttcaagagaagcaatcgttactcaaatggttgatacaggaattggagagaataataaatgataggattttaaattcagattccattgcagaattgaatgcatctaatcagcaccgtcgtttattcattaacaatgggtatttgcgtttcttgttacgtataattggatttgatttgccttatactatggaagaagtgccagagttggcaactaccgttgatatggaacatttgacaaaagttaccgaattgattaaaaaatgggactcttctcaacctgtgatatttgaagatgataaggtgccttcttattttgtacgtacaagagaagcaggttatgatgaggaccagtataacgaaaatgatcaagagtatgattttaatgatgattctattgcatttgaaaccgaggctaatccaaactctaaccgaaatcatgtttctgaattggatcacttggaggaattagaaagacaattactgagtaatggttctagagttaattcaaaagaacgtaatggtacgaaagggaaagcaagaaagaaatctaaagaaaagaaacgccctgaacctaagaaagtacgtggtcttaaacgtagaagaatacctaaagatcttttggatgatgatgattcacaacatgtcgtcaaatctgccgagtttgtccatgattcggatgatgaatctgatgatgaaaaagataaagccttttttgaaagagaagaaaaaatgaggaatttattgaatgacatgggtggtattgctacttcggaacaattgaaggaaattcaaaaagtttggaagaatttggaaactggaggaaacaataaagttgcttctactgtggcaaaagctgtgaaagaagtcgggttatttgttgaagaaagtgacaacgatgatgaggtggaagaggaaagtagaaactctgctccagtaaatgaagaagctgatcgtacaatttttgaatcaggtgaagttgatacccaacaagatttatcagataacacttcaaatacttctgatatggaatcagaaactgaaactacgaaaagatcatttgttgaagacccagaagaaatactgcatgtccaacccaagagaaaacgattagtcatcagtgatgacgaagaagaatag

SEQ ID NO: 6108 - DNA, 2118 bp, Candida albicans
atgataagacgaaatatattagttatacagggaagatcattttgtcaatcttcatatttagcagaaagtttaaaaccaaaacctgacatcgagaataaagtaacaactaatggcgattcaaacgacatcactaagatagcacttaatacaaacaagcctggagatgatggctcattaaagagagatgatagggtaaaaaatttaattaatcggcttacggcaactggacgacacgaagctaaacgaaatccgactacgacgaatgcaagcgatgcctataaattgtttcaaaatccagataaattgaaagccttgaaaagaatgtttgcacaaccaaaggtatccaaaaggcgggtcaaaaaacatgttaaggaaaagtttcaaaaaaagcatactgaaaagaataccaagacatcaactgaaccattcttcaaagacaagtcaacagataaatatttaacgagtaacaacatcaagaagcacaatttagaacaatttgttgcccctaaaaatgaagatattgcaagactagctcataatttagatcgagtattattttcaccaggagtccattttttacaagaccctagaactcgaatatataatttttccccatttttgaaaaaagtgatccattataaagatttcaattttaaagctattgagaattatacaccagtatcgaaacatcaacaattgttggaaaactcccaaaaatttgaaaaacaattctattcgtcaacttcttccatgacatctttattatcgaaattttatcattttttgaataaatatgatagatataatgttaaacggtttggtccgattccattcacagggatgagtaatgacttgccaactaatttgattctaaaacctcaaggtgagtttatggattcaacaacaaaggagaagaaaccagtctattctattcaagctgataattcgtgtgatttagatactttacttagtgccatggggatgtgcatggaaacattattaacaaacccacaaaatgaatttgtcaagtaccataaggatagtggtgttgagtttaatgaaccacttggtaatacttataactatgcatcttatggggactttttattgagatcacagttggattgctatgatgaaagattaccaggaaatggtacttttgatttgaaaactcgagcatccagtaacattagatataattccaaaagtggatctttagagaagaatgattatcagatttggagattgaatggcacttatgaatcctacgaacacgagttcagagatatgataagaactggagccatgttgaagtacttattccaggcaagaatagggcaaatggatggtattttcattgcctatcatagtatcaataccatatttggtttccaatatttgccgcttgaggaattagataaattgttttacactagagacaccattagtgaattccctgacgttagtgtcagaaatttgaatgaacatagattgcctgacaagttaccatccttgattggggaaacacaatttaagttttcgttggaaatctggcaaaagttattacaagaacatattttgaaagatttgaacaaagaattcaacaataaaccaactccatttagattgagtgtgaaatatgacacattagcacatctattaagagtgtttgttataccagctactgatgaagagattgatgtgttacaatcatttccagaaagattcaaacgtgattttgctgaagatgagaatttgggtgaggtgaagaaacacgccagggagttaacaaagttcaacgaaaaatgtcttgaaacaaaggaagtattctcctatgttattcaaatggattcatgtatgattgatggtaaaattagacaataccatcaattaccccgtgactatttcaaagattggcaattaatatataatatcaagagaacgagcaacgctcctaagaaatacgtcagcaatttattgagattccctgatacaaagatttctcaacgtttaaagaaagttcatcaactttatgaaaaaataggatcaattagaaaaaagtcatggcaagaaaaagacaaaaaatcacaagtgtatcatcccaaattcaagttttga

SEQ ID NO: 6109 - DNA, 1890 bp, Candida albicans
atgactccaattcaacagactccttctgttcacaacactattgatgattcctctaacggttttccaaatcaaatttcgcttggtgaatatttattttatagaatttcccaagctaacccaaaacttaaatccatatttggtattcccggtgatttcaatctcaatttattagaacatgtttattcaccaatcattgctgaaagagaaataaagttcatcaacacatgtaatgaattgaattgtgcttatgctgctgatggatactcaagagttattggtggtatgagtgctatgattaccacatttggtgttggtgaattatctgctatcaatggtattgccggtgcgtttgctgaacattgtcctgttttacatatcgtggggacaacttcgatgaaagatagattgcgtgctccaaatgaaatgattaatatccatcatttggtaccaaaccatgatccattaaagccacctaatcatgatgtttacaagtctatggttgagaatatttccgttgttcaagaatctttagactatgacactaagaaaaacttgattaaaattgacaatgtattgaaaaaaataattcaagaggcaagaccaggatatttgtttattccatgtgatgttccagatcttccagttccaggtaagatgttattcctggatccatttactgccgctacaagatacaccaatctgatattatcaaaacaagtattgaatgacgtaaccaatgccatcctcgagaaaatgtatgatgcaaaaaacccatcaattttctccgattgtttaacaacaagatttggattccaaaatgatctcaatagatttatcgaccaaatccccgaaaccgtcaaattgttcactgccaatcttgctagaaacttggatgaaagtagaaataattttgttggcgtgtacaatgggaatggatcttccgatgacaaaactaaacaagaatttgaatcttcagattttatattaactctagggtttttccccaatgaaatgaatactggtggccatacatcaaatttctcaatgataaaagacgttgtcattgttcatccagattacattaaagttaatcaccaaatttatcatattaaacaaaatgatggagaaagattattcactttgggtgagttcctttgtaccttgactgagaaattcgatccatcaaaactctcggtagcagcagcagaacccaaaaagatttaccaatatcaaccctcgcaacaatacagtccatcaaatcttgattatattccacagggcaaactcattgaccatttcaacagcactcttaaacccaatgatttgtttattttagaaactctgtcatttgtttttggattaccagatatgaaattcccaaccaatgtacagttgctcacatctccttattatggttcaattgggtatgctgttccagctacttttggtgccacacttgctgtcaatgatttaaaatcagatagaagaattattgttgtccaaggtgatgggtcagcacaaatgacggtgcaagaattatccagttttgtcagatataaggagattttaccaaatatgcctcatatttatttgatcaataatgatggttataccattgaacgtaaaatcaaaggcccaaatcggtcttataatgatatcaatggtaaatggaaatggcgtaatttattaaatgtgtttggaggtgttgaaggtgaaatgtacgattcatgtgtattgaagaacagttctgaattggatcaattctttaatggtgataagacaaaaccaatactgtctcacaaattacaattctatgaaataattgctggtaaatttgatgtacctcaaagagtcgataacatgatgtgtatttcaaaaaataaaaattga

SEQ ID NO: 6110 - DNA, 759 bp, Candida albicans
atgtatagaactatttctagatcatcttcaggtcttattcgtcagtcaactgcaagactcaccagacagttatccactaccagaactacaccaagccaatacaactcgaaattactacttggagtcttgggaaccggtgccttagcttttggatacttttcacaacaatcaagtttaatccaaaatgcatccactgctgaaaacattgaaaaagtttttgaagaaggtaatgccgttgccaaagacgcccaagaatcattggatgcaagacaagaaaaagtgatcaaggaaaatgaacagaaaacaaaaaaagcagaagatgcaaaaacatcttctgagtccaaggcaaatgtcgctgacaagaaaagcaactcacaacctgaaggtgaacctgaaggagaaggtaaacaagaagctgcatttaatccagataccggtgaaatcaattgggactgtccttgtttaggaggtatggcccatggtccatgtggtgaagaattcaaggaagccttttcctgttttgtattttctgaaactgaaccaaagggaattgattgtatcaagaaatttgaaaacatgagatcttgtttcaagagatatcctgaacattataaggatgaattatatgatgatggcgaagaagaagcaagtaccgaggtcgttgaacatgttgttcttgagacttctgaacctgcaattgaacaaattgaacaaggaatcaaggaagacaaggtcaaaccaaacactaaatctgattag

SEQ ID NO: 6111 - DNA, 1077 bp, Candida albicans
atgaaggccgctgttgttccaatttccattaaggataactatttaactgaaattaaagatatcccaaaaccggaaatcaaagatgatcaaatcttaatcaaagctaaagcttgtgccatcaatccaattgattggaaacatatcgtttaccaaatgagtaaaccaggtgatgtagctggaagtgatgttagtggaattgttgaacaagttggggccaatgtgacaaattttaaaaagggggatttggtaagttcatttgtaatggggaatatgtcaccaatgagtggtgcatttgccgaatatgttgctgcatttcctcaagccactattaagtatgatcatgatttagataatccaccaaaggcgaaagcttccatgattgattcatttgaaggtgcagcgagtattactatgggattgacaactgttgctcaatcattttcacattctttgaatataccaaaacataagaaaccaggtgattccattttgatttggagtggtgctactgcaactggtattgtagcaatccaagttgccaaattagtttataatttaaaggtcatcactactgcctcgccaagaaatcatgaatatttgaaagaattaggggctgatttcacattggattataaagaccccaaaattgttgacaaattgaaactgcttggacacatcaaatttgggttggatacaattgctactccacagacatttcaaaaactttatgatgccacacaaggtactcctgaagtttatttggattccttattaggaatggatggtaattctatcaagacggatcccgcaagagaaactactgttcattgggggcatactatgggttatctttgtgttcttaaaacgaaaactttaggctcaactacatatgtccaatcaacagagttgttgaatgattataataaatggtgggaaaatgtcatgccaacgattattaataaaataaaacatgcaaatttaaagattttacccaatggattggaatcagccaatgaagggttacaaatgtcaagagagagtaaagtttctggagagaagattgtttttaaaatttaa

SEQ ID NO: 6112 - DNA, 681 bp, Candida albicans
atgaaagtagttaagatttgtggtatcaagacggtggaggcagcgagtgttgctatagacaatggagcgaatctcttagggtgtatactagttcctaatcgtgcccgtacgattgatttggaggtggcaaagcagattgctcgcatggtaaagagagataggaacccaccgccaaagtttgcgggtggtacctcaacacaacactttgaacaggttgcacaatggattattgagaatgggccgtttttagttggggtgtttaggaaccagccaaaggaagaagtgtttcgtattgcgagggaggtggggctagactttatccagctccatggactggaagataagctagagtttttgggtacagaatttgggttaattcccaggtatgttgttcctgacgagctagaccttttggaagagcagagcttgctgttaacgcaatgtgtgagtttgccgttgcttgattcggaagttgggggtgaagggaagttacttgattggacgtttattgagaagttacctacaaaagctatacttgctggtgggctaacccctgagaatttgcctacatttgacaacattttgggctacgatgttagtggcggtgttgaaaccaatggggtaaaagattcattgaaaattataaagtttatacaaaagggacacgctcagtcgtcttga

SEQ ID NO: 6113 - DNA, 2292 bp, Candida albicans
atgagtgatatttatattattattcatatttctactacctgtgatgactcgccgacatttgtcactaaggattcttccgagttaattgaatttgcttgggaaacagtcgatagtgtcactttggaaactttatacaaaggatcaaacttggttcgtccaaccaacacacctatcacaccttactgctcgaagattcatagaataacatgggacaatgtcaaaaatgctgggtcgttcaaagacgccatcacaaactttgatcaatacgtacaagaacacataatttccaagaaaaaggagttttcaattgtgatgtttgacatttccaaattgagagttcagttggttcgtgaagctagagacaaatccgtggttttaccctcgtatctacaacatccaaggatttttgatttaccaagagaatatttaaattggcaatctagccaccctgaaacattatcataccccccaacttctttaactaatattattactgcattagaagttgaggttgagaatatatctgaatatgtcgacttgccaaacttttcttccacaccatcaccatcaaaagcttcagcaacaacgacgacgacaactgcaaatgtcacagccattgacgtcctttccagtgaaacagaaccaaatggtaaagtcattgcaaatttgcacgccaaaattgccaaacaattgatcaaaaaatccatccctgttgagaatcaccctaatgtatttacaagaccttttgattcggctcaagatatcactgcttttacatcagaaagatcaaaagtactctatctttccaacttgccaaacgacaccacacaatcagagttggaatcatggttcactcagtatggtggaagaccaggtgggttttggacttttaagtctgcagatgataacaataataataacaacaacaatagcaatggcgggaaaggatatcagaatgcgagaaaatatggtatttcagggtttgtggcctttaatactcatgaggaagcagttgattgtttagctttgaatgggagagtgttgaatgatcgtcctattgaagttcaagcgtcttctagtaaagtgtttgatatggccatggataaattgttgttgactctgttcccactctcaaagaatagacctagacccggggattggacttgtttatcttgtgggttttcaaatttccagagaagaacacactgtttcaggtgctcttttgcggcagtggcgtttcaggatgtttttaacagtaatacaggcaatgccaacggtaatggcaatgttagcggcaaccacaaccacaaccacaatagtggagctcgccgtggcatgaatttacagcctgctcaagctaatgagaaaattggaacaggcaatattagtattccttcttacaacgatccaatcaagggtccaacaggtaatgtcactaatcacctcaacaattctgagaccaatttactgaacaacactaatcttaacaacaacaatcatcatagtaataattatcacaataactaccatcaccacaacaacaataataacaatcatgggaatagcaatggtaacaccatacatggtcgttcccattataacaatagtgttccatttagagcaggtgactggaaatgtgaaaattgcatgtatcacaatttcgccaaaaatttgtgttgtttaaaatgtggtgtcgccaaacctgctattaacaatcaacaaaataatacaattcattcggtgaattcaacggccgctgccatagctgcagcaacagccagtggtcaacctttaaacttgaataataatgcatttttgaaccttcagcaacaacagtctcagtcacaaccccaaggtcagcaccattacaaccaacattctcgtaacaacaatgcttctggggcatcaaagttcaacaatggctacaacccaaagaatcagtattacaataataatagcaagaatcttagcaacaattttggtcttaatggtatgcatcagcaaaaccaaaatcaaattttgatgtattcacaacaattgcaacaacaacagcaacagcaacaacatgatttaaatggaagtagctcttcacaccaactgaaacttcaattgaataatactgaaggattatacagaacaagcggacaaccaaacttaggatatcctagtatcaatcatgaagtatccggtcctgctactttaagagatgtttcaaacaactcacctgcattgaatagctcatcacttaactcattagccaatcatatgaattcattaaatttaaatcaatag

SEQ ID NO: 6114 - DNA, 3678 bp, Candida albicans
atgtcatcattcggaagttcaacaattgcaaatggtgcttcactgggtaacatatttgccaatcaatccaattttggaaattttctaggagaaagtcaactaaatggtaataaccaaaccaatttcaaagcagcttcggttttcaataatgacaataacaatatcaacacaggatcacctgaaaagaatgcaaatacaaagaaaacacagaaacaaaccaacaaatcctaccaaaatgggaaatcaacatctacaacatctaagcaaatttcaaatctacaggtgttcaaagagagtgatattgttgcaactggagctttattcgaacagcctgagcgactaggttttaatcatagacgaccaacagaagtaagatcaataccgaaatactttttaactcaaccaaagcttttgtatactcctgaatttgttcaaaatccttgggatcaagaaaatcaaaataaattgactttgatggaagcagagaatggtggtagagattatcaaggattgtatgaagacatgcaaaaacttcgagaaatagaaagaaccaagatggaagagttgggattagtagatgctgagaatgtagctaaagatttaacagaagccatatcgttttctggttcttgtcttgatatgtgtccagtatttgaaagagtgagaagacaattggaaaataatgtgaaggcattggaaaaagatcccatatcaaacaaaatttcacgagagcgtgcagttaaagcgttttcaagaccagctgctggtcaaccaccgccattaccatcggatgttagaccgccacatgttttgagtcaaacattaaactatttggttgacaatattttacaacagcttccagaagcacattcatttatttgggatagaacacggtctataagacaggattttacgtatcagaataactttggtccagaggcggttgattgtaatgaaagaattgtcagaatacatttattgtcattgcatataatggcaggcagtgatgtagagtattcccaacaacaagaattggaacaattcaataaggcgttgcaaacattaatggaaatatatcaagatgtcaggaataatgggggcaagtctccgaatgaagctgaatttagggcttatcacttattaagtcatgtaagggatcctgacttggaaagacaaattcaaaagttgcctgatgaagtatataatgacaaattggtacagctagcattaagattcagaaagatcactacacaaaacaatgttgttgaaaggggagtaacgaatctagttggtgcattaaatctctacactgaatttttccgacttgtttacagcgaggaaacacctttcttaatggcgtgtttattagagacccattttaacgagataaggttttatgcactcaaagctatatccagaagtttccacacaaagactaaaccttatgcaattcaacgattgcagcaagttttgggatttgattctgtacagaaattacaaaaatttctcggttactatgatatcgatattatcaacgttaatggcgaagtattggttgatttattcaataaagagaaattggaaaccacgtataagttaaattcattccatgagaaagcaaagtattctccaccttactcaacacaattggatgacaaggtcaagggattagattggaaacattttgtaaatagtggacgtccgaataccggggtagcattaaatttacaaccacctacagtagaaataacttccaaaccccaacaatctggctttgttaatctctccagtttcaagaagcccgagacggtcaatacttttgattctactagtttgcaatctcaacctcaggctcaggctcaagcacagtctcgaccacaacctcaatctcacccacaatctttccaaataccgaataacgctcctcataagaatattttcaacttcaagctggaaattagttcagcacccggatcaataaaacctagtaatgtcaattctattagttcagccactgagccagcaaagcccgtgtttctgttcccgtcaaatgaaaacaccagcaaaagtaatttgaaactgaatgttcaaaaccaacagcaaccagttcaatcttttaataaaccggttcctaatttttctttaccgacacagtcaactttaaataaagttccattaacggccccatcaagtttatcatttggtatcacttcaccacagaaggagaaggagaaagaaaaagtgaaaccgttagagcaaccggataccaaagtgtcgattcctgctcccgttaggacttctctatcagttgtccctgaaaaagtaaaattgactcaatcaaagatgtttccattggctctccaacaagtatttgaacagatattacaggacacaattaaatcagaattacaggtggttctttccaaattattaagtaaatatcataatgaattggaaagaaaaaaggttattcattcattagggtctgagctatacgatgcctttttaagagaagttatgtatgagtgtgttttagaagctcgagcagctcaattttatgattcccatttgaaaaaaagaaaaatgaaggttattattaggaattccaaaaaagctgttaataagttgcgtgaaaagaaaatgaaaatgtatgaattgaaatcggtgacttttgaaaaattaaagaaaaacaaaagacgactttcaataagtagttttgaaagtaactctagctttagtaagagaaaaagacatgatagttttgatgtatctgttatcagtgagaagcaacatgaagttcatgaactatggtctccaatcaatttgtcagagtttttaaaaaattgctcagagaatttaaaattgaaaatttatcaaaacaatttagatttgaagtttttattaattgtggaaaattggagaacctcgtatgccaaatggttaaactcaaaattggggttaaaggcgaatatgacatcctctgtgcttgagaattctatcctgaatgacaaaataaatttgcttattacaagtatgcccaacaaagaacaattgaatgaaagtttttttgcaaatacagctttcatattatttgagtgtgggttaaccatttcaagtgtcacttcaattcaagaaaaattgcaagctgatgggaaaatcttgaaaaaaatcatatcgttgattgataaatatagtcgctataaagtactgatcattattagtttctgggacgttagtgggtcgagtataacaagctcagaagttgctgatttattacatttgacacaatattcatcggtgtctaatttgaagagtttggtattgtgtgacatgacaactaaaaatgggaatatcaatacgattttgtcgcaagcattcaacaaagtcagtttagagtttaatggtgaattaagttcaacgggttcaaaacgtgaatataatgaaaccaaattgaagctgctgcaaactcaacagcacacgctacagaaattaaatcatagtattcgaaaccacaagattcgaaatatagataatctgaattataactcatcgattatagaagaaagtactccatcagcatctcctaaacgcaaaaagattgatgataatcgagctaatactagtttaagtcaattacaagatttgactgcagaaatcagaagaaagtataaaaagtag

SEQ ID NO: 6115 - DNA, 1695 bp, Candida albicans
atgctgaagaagaatgataatataacttatgatgttgaaaagatatctattgaaaatccacttcctgctaaggagtttaatgatttccatgacaaattagatgttgaaaaatatggagaaactaaaagaaaattgaatctgcgtcacgttaatttattaatgattggtcaatctattggatcagcattgtttgtcagtataaagaatccattacataatagtggttcactttcattttttttagcatttgcaatttgggcttgtttagtgatatacccattgatgcaagctattggtgaaatgtgttcttatttacccattaagggttcattctttcatttttctgctcgttatgttgatccagctttggggtttgcttcctcgttgatatatacttatactgcattaatgtttgtttgtattgaagcaacggcctgtgcaggattaatatcattttggacagatattaaccctggtgttttcattactattgcattagtgttatttttcttgctcaatttgtttggtgcccaattctatggtgaatttgaatcgattttttcttcatttaaagtaattttgattttgggcttaatgttgttttctttaatatcaatgtgtggtggtaatcctcaacataatgcttatgggtttcaacattggaaagaaggtggtcttttcagaccatatttggtgggtggcacaactggtaaatttttggggacatacaattgtttaatttgggctgggtttgcagctggtggtcctgatgtgttagcattgattgctgcagaagttaagatgccacgtaaaaacattgggattgttgctaaacgttcctatatcagaatatacttgttctatctcggtggtatttttttcttgaactgtcttatagcttctaatgatccatcattagtgaaatccttgaaatcatctactgtgtcaccttggactttaggtattcaaaatgttggtgttcgtgggttgggactggttgttaatggagctgttttgacttcggcattttcttgtgggaatgcatttttctttcttggaaccaggtcactttattctgcctctttggcaggatatgtcccaagattcttctctaaatgtttgaaaagtggtgttcctatcaattgtgtcatattcaccggtgttgtatcattgatttcatatttgaacgttagtcaatccactggagtggtatttaattggtttgttaatttagccaccacggggttattatgttcttatatctgtatgtggctcgcttatttcaaatttagaaaagcatatgtggttcaaactggtaaacaaatgaaaaagggagagtatccatattatttggcaccaaaattcattcatccttatttcacatactttggttttttcattaatgttgtggttttatttttcaatgggttctggatattttttcctggacaattctccgtatctaatttgtttacttcttattttgctccagtgtttttcatctgtttatttgttttttggaaagtgtttaaaaagactcattggagaaatgccatggaagctgatattactacaggtaaacaatacattgatgaagaagaagaaagagatattgaatttgaacttaaccgagaaagaagaaaaggatggttttttgttgcctgtagaaaggcatctgatttctgttttagttag

SEQ ID NO: 6116 - DNA, 1272 bp, Candida albicans
atggctcctactgctgttactcaagaaccagaagacgttcaagaaacaattaaaaggttagctggcttaaaagtcattggccattctaaaaactcaaagggaatcattactggatatgatcctgaatgggccgataagttaccagaaaccactaaacaaagatacgctaaatatggtgttgacatttccaaaggttatccttatgtccctgtaaatgaaaaagtaccaaagtttgttgacgaagttttcgctatcagaaacgaagaatatccttacattgaaagaggtaaaaatgctgacccagaaaagaagctgttatttgatgctgctgaagatgtcattcatttaactccttatattggtactgaaattgttgggttacaattgagtgaattgactgaacaacaaagagatgaattggctttgttgattgctgaaagagttgttgtatttttcaaagatcaagatttgtctcctcagaagcaacttgaattaggtcactattggggtcaagttgaagttcatcctcaagccacaagaataggtgaagagtatgatggaatatctgttatttggcaagagcaacaaagagacagatggggtttaaatttgacttttaaacaatccaaaaaaggcaattcacaatggcacagtgatttagtccacgaaaagcaaactgctggtattactcatttgcaccttgatgctattccgggtattggtggagaaacattgtggagttccacttatggtgcttacgataaattgtctccagctttgcaaaagttcttggatggcaagactgcaatttacagatctgctcatcaatatttagatagaaacgatccattgaaaggtcctaaatatgttgagagagaacatccaattgtcagaactcatccagtcactggctggaagtatttgtttgtcaaccgttctatgactgttagaattgttggattgttgccagaagaatccgatttgattttaaactatttgtattcggttattgaaaccaacagggacattcaagttagatggtcttggcagaaggaattgggtagtgttaaaaacaacaagaaggatgaaccaaaacaataccgtggtgttagtgccttatgggataacagaattagtaaccatagtgttgtccatagtgaagaatcaattgttggcagacatggtacaagagttacatctttagctgatactggttattacgatccaaattcaaaatctcaaagagaatctttggggttatctttggattag

SEQ ID NO: 6117 - DNA, 1884 bp, Candida albicans
atgactgatgcgcactctgtgtctactactttggacgatataatcaatgaattgaaattgacatatgattcctctgttggtttgcttgatggcgattccattcggacgataccaaatatcagtacattaaccaatttgaataaattgttgaaaaacttgtggaaccagttagacgaggtggaatcaatagatagtgatgtgctaaataaaatacgaactatcaaggagagtgaaatcaaaagtgattcaaaaacttccgaaaacgataaaaaacgtaaaaatgaagaattaacaccagaacaccaggacgatgaagacgaagtgcctatgagcgcaacaaagaaacgcaaaattgttgcagcagcgaaagaagctgatgccaaagaagaaaaggatctagtatctgaagccgatggaaaagttgaagatgagctcgatgagaaggaagaaaaagaaaacctcaattcgaaagacgaccccataccacccgtacaaacaggaaattttacacaagacaacgatactaggttaaagaatccaaaatcagagtatgtggaaccgcagacattatctgcgtcagcgattgcagaacttgggttattttccgaagaaaacaatggtttggaaacacaaggaagagaatacttgaaaaagaaatatggagttgcttcgtatccagaaagagacttgcaggatttattacctggggaaataccaaatatcgatttttccaaaaataaaccaccaagcaaccaggtgcagttcactactttccaatcctatattgaatcctattttagaccgtatctgactgaagatataaaatttctaaaagagcgaaatgtggtaccccctgggtttgaaaagcaaggctatgatgcagatgttactccgtttataataccgaaattgggtaaattttatgcggatctttggtcggaagaggattccactctcggttcaaaattgaattcgccagccttccagcagccgtcctctgattcttataaaccaaaggggtctattgaagggttgactgatgaagcattgttcacagaagatatttcgtgtgggccgctttccaatagattgttgtctgctattttaagtaaccgagaaggcggattaagtgatgaagaagatgcaccagccaatgattccaagtcagaaacgaaagatgcaagcaaatcatcattggctgaggaggaagttgccacacaattgaacagtgaggaagattataagttatcggcagagcaaaacgattttcagacaattgaagaaaggctcaaacgtgaactaaaatatattggaatctttatgaatttaccgactactggagaatccaaacctaaagcgaagcaggcaaatggaagagctgcaaaaaaaatatcggctagcattattgataacgacgaatggatcaagaataaggaggatgatgaagtttgtgcggaaattagaaagctacaaagggagttgaaagaagtaacgagcagaaatagagccaatagaaaaaaattgattcctttggttgaagagcatattgcataccaggaatattgcgcaatacttgaagaccttgataaacaagtagacctggcttatatgaagagacttaagggtaagggtaaaaagaaaagactggacgtggtaacgccacaacaacaagcacttaatagtgggttgagagcgttattggaaaagagacgaagatggatagacaatattggaaaattgtttcctgttgctgaaaaaatgaaacgcgttcctagtgagtccatattgatacgtgaaggtgtggtagagtcagagcaagttgacgatgacaataacgaaaatacctcccctgcggtagatatgttaacacagaaatcactataa

SEQ ID NO: 6118 - DNA, 1542 bp, Candida albicans
atgactgctgctgatactcattctatcactagtgctgatgttcaagaacataatagacacattattcgtccaccaaaattcacttggcccgctattcgaaaatatgccattacaagagttacttcattatgggttggatgggatgaattgaaacaatattcctggcacgaagttcttaatccgtttgaaccattagtggaaatgaatttacatcaatggaattttttctttttgggattttgggcatggacttgggatgctttggatttttttgttacttcattaaatgtatctaatattgctgaagatttagattctacagttaaagatgtatcttgggggatcacattggtgttgatgttgagaacggttggggcattaatatttggggctattggtgatacatatggtagaaaatggccctatattattaatttatcatgtttgatggtgattcaaattggtactgggtttgtcacaacttttcaacaattcttagggttgagagcattatttggtgttgccatgggtgggttgtttggtatttgtgctgctgaagcattaggtgatgctcctaaaaaggccagaggggtgttatctggtattttccaagaaggttatgcatttggttatttgttagctgttgttttccgaagagctattgctgataccacagaaaaaacttggagatcagtattttggttcagtgctggtcccccaatcattcttatcatttggagattcatcaacccagaaactgactcttatcaacgtcaaaaggaaagatttgatcaaggtgctgtacaaaagaattctaaagctgctgaatttaaatctcaagccaaaaaggcattgaatcaatactggttgatcattgtctacttgatctttttaatggctggatttaacttttcttctcatggttctcaagatttatatccaacaatgttaaccaaacagtatcattacggtaaagataaatcaactgttgttaatgtgtgtgccaacttgggtgcattagctggtggtattgtaattgctcatttatcaacttttatcggtagaagaactgcaattttgattggtaatgttattgctggtattatgatttacttctgggcattccatccaatgtggatcactgcttttttcatgcaatttggtattcaaggttcttggtcagtggtgccaattcatttatcagaattgtctcctccacatttccgttcatttgtaagtggtgtcctgtaccaattgggtaatttagtcagttctgcatcttctacaattgaagctacaatcgaagaacaaattcacgattatggtaaaaccatggctatttttattggtgccgttttggcttatttgatgtttgttgtttttattggtcctgaaaacagaggtgccgaattgggtgttgaaagagatgacgagtatagtgcgtacgatagtgatagggaagacagaggtgattctgatcttgaagaaggtaatattactcaaaagactttggaaaaaccagaagttgaacataaagagtaa

SEQ ID NO: 6119 - DNA, 1767 bp, Candida albicans
atgattgaggaagacgaaaatacttctttactttctagacgtccgtctcacagctttcttgacactccaataggctctttcaaaggacccaactcattacacaactttgcaagttctttcaccagagcccagtcctttgctgccaataaaatcgataattcgattcataagaaaagatctttctttgttagtggtgatggcggaactgttgaagatgacgaaacttttgaccctgagttattagttccctcgtatcgcggtgaaaggttaagcacggttatgcacgatattcagagcagaaaccagttattcatgaatcctcccaaccagttggaccagagtgtttctcccaacaacgatgtgtttttccatgatgatgtaatgaacgcattaaacgaatccagatcaagacagaattcgacatttggcaactcacaatttaaacacagaatatactcggccccatccttttcgagtttcagatcttcaatctcagctgctaccacaccttcaattttccaggtgagaaaaatagaagatgaagacggtaatgtggttactgttttggctggtcagtcaactgccccacaaacaattttcaattccgttaatgttttgataggtgtgggccttttagcattacctgtgggattaatgaaagcaggatgggtttatggtattcccattttgttagtttgcggtttgacgacctattggacagcatgcttgctctcaaaggcaatggataccgacgacactattatgacatatgctgatttgggatatgccgcatatggttccatggccaagttggtcatatctgtacttttttctattgacttgttgggtgctggtgtatcattgattgttttgtttagtgattccttgtatgcattattgggggatgaccaagtctggacaaggactcgttttaaaatattgagttttattgtgcttactccatttacatttgtgcccttgcccattttgtcaattatatccttgtttggtatactctcgacaatttcaatcaccattttggtaatggtgtgtggtttgctcaagccaactgcaccaggatcattattggagacaatgccaacgaacttgtatcccaaatcgttacccgatttacttttggccattgggatcttgatggcaccgtttggtggacatgccattttcccaaatctaaaatctgatatgaggcacccatacaagtttacacagacactacgctctacatattcaatcacattactaactgattgttcaatggcggtgttgggatttttaatgtttggacaaaactgcagtaacgaagtcaccaatacattattaactactgcagggtatccgaaatggtgttatcccttgatcagtgggttgatttgtttagtcccactagctaaaacaccattgaatgccaagcccattatttcaacattggatgttttatttggggtcgccaatattagcacaaacaagatcagagagaccgtcaattcattaggaagatttgtgattagaattggtgttaatgctgtttttgtcgtgttggccattttgttccctgaattcgacaaaatcattggaatgctcggagcatctatttgttttattatctgtattattttgccatgtttgttttatgttcgattatgtggctccaaaattagaggtttcgaaagatttatggtttattcggctattttcatttcgtgcgtattagcaagcgcggcaacttgggctgtcctcaattattga

SEQ ID NO: 6120 - DNA, 2892 bp, Candida albicans
atgtccacattttatgctggacaattattatgtggaggatttcaaggtaccaccgttacccctcaagcgtatcatttaattgttgaacaccatgtatcggccatgatattatcgcggaaaaatgcctttaatgtggagcagatgacgaaattgatcaaagaccttcagtatattgccatgacagagggcaggtacaagtatccaatcatgtttgccatagatgaggaaggtgggatgatgaactcgttgtttgaccccgacttcttaactcagtaccctggggcgatggcgctagcagcgacaggtgatcctcaattggtgtatgagattctgagagctatagctattgaaataaagaaaatagggttttctataattttaggtcccgtgttagatgttgtgacaaaactatcacatcagttggtgggagttaggagttttggaaccaccattgaagatgtggttaaatatggacgtatgtgtgcccaagggttacaggatggagggttgtttaccgtggggaaacatttcccaggtattggaaacgctactgttgactcattactagaactacccatgatgggtgactcgttagaacaattgaggcattttaatgttgtgccatttgaaatgttgatcaatgaagggttgttagatggaataagtgctgctgggtgtggtgtgcccaatattagccccgacgaaacgcatgcatgtctctccccagttgtgattaaccagttgctacgacaagaattgaactttgatgggtttgttattagtgagtgtttagagatggaagctctttaccattctgtggggttaggccaaggggtgattttggcaatcaatgccggctgcgatttggtgatggtgtgtcatgacatggaattgcaaaacgaagctattgactcaattaaaacggccgtggtaaacgggaatttggacgaagaaacagtactaaaaagtttgaagcgaataaataaattgcagacaagattgccgagctggacacaacttttccctgaaggtgaagtatcagccaagttaccaccaactttgtttagaaacgaatgtcccgtggtgtgggagcagcatcagaaactttcgtcattggcttataagaaatcaatcacattgatacgtgattttgatggaactttacctatcccaaagcatttaagtgctagaggtagcgaccaaattgactctattttgttgctaacgccattactaaacccgatatacccgtgtaaacaaacagggtcaagtcaacggttgtttactggagaggaggtgtttcagaaattcggcgactttttatctaaccatccaatcaacaaaacaaaatcatacaatgtccttcacacaacatacactgctaacggattgacaccgctacatgaatcgttaattgaacaatctaaaatagttatttttctcactagtgaagcgggaagaaacatgtaccaaattggtattgtaaagtatgtttccatattgtgcggagtcaacccgttgactttgactaaagggttgggtccagttcagccaagaaagccattaattatagttgccacgctgtcgccatacgatttcttttacaacaagagtattggaagcgcatatttgtgttgctacgactacacaaataatgctttagaaaacttggcatctttgttgatgggggattttgaagcccaaggatgtgttcctggagaaaagaagttttcgacaaagcacaagaaactggcggtggaaggtagaaatgaaaataaccacttgagtgcaaaatcagtgcataaacctaaaaggagatggttggttgacgagtttctgatggaaagagactggcaaggtttaaccaagttattgaaaacaaacagtgatcaacttacaaacgatgggttttataaaaggctcgaagggttgttgagctccacagcgaaacatcaaaagcattttgttgttcgtaactcgtctttgaatatcttgtatgggattgttttgacatgggtcaatgaatcaaattgcggacatcttgtgtacatattggttgaaaaatcaaaacgtttgcagagtattgggaaaaacttacacctcagagcaatacgatatttgataaaggagaggaaatgtaatgaaattgtattaggtagctcgttcccgttgatttcacttggtggtaacaacaataaaccattttttaaaggtgtgggctggaacacacaagtttctacggagaagagtgtcatgcttttgcaaaatttggatagctggctggtgccacagaatattttgcaagaaatcatgattgttggtgtaaggtttgatatctgttctgatacaagtaaattaatgaaaatgatggaaagatgtttgctgtcagaagcatacgatgcaagagagtataaaaatgtcaagagtctatacagtgaggcacaaaaatacctcaagatcaattctccttacgaagtaaagattattcttgcccttgaaccaaccacacaaaatgtcattggaagtattgtgatatttactagcaattcccaattgtcaaagttttatccgtttattgatgtgtttggagaagaaaatgacagccctggaaacagatcgataattggtgcgattgctggtcctgttattgatccactgtattccaatttaacagagatttttaagtatgggttaatttgcagtgcaattacgtttttgaaaacatctttgagtgaggataatataaagagttgtataatgaccgatatgggtactgaagataaggctatgcgtggagttaaagagataggatttaatgtttggaagccttatcacgataattacggatataatagtgtaaatagtaatgtagagagtaagtttggattgtga

SEQ ID NO: 6121 - DNA, 1152 bp, Candida albicans
atgcctagaagattcaataagaaaaccgccaccacattcaatgttgtacatagagctcatgatgatgcaaggttctatgacgatgaagcatcagaacacgttttggttccacaatctacaaagaaaaaagttgtcaccaccactgagttagaaaagaaactcgctaataccaatataagagacaacgaaggattggccgcacaatatggtatcacttacgacgactcaaagtatgattatatgcaacatttaaagccaatggggaacccagatggtgtttttgtgggtgccaagcaatcccagccaaaacagctgatagaagatttatttaaagaccagttaccctctaaagaaacaagaaaagttgccagagatttaaaccaaaacatacccgacgaattacaagggtttaatccaaatttagatccaagattgcgtgaagtattagaggctttggatgatgaagcgtatatagaagaggaggacgaaggtggtgacgaagatattttcaactcattgttgcagtccggtgaagtggaagatgaggaagagttttacgaagaagcagacgactatgacgacgagtgggatctagataattatgaagaggagtacgatgccaagtataacctggatacgcccgaaggtgtgaatctgaattggcaaagggattttatgcaattcaaaaaggacaacaaaaacaaacacaacgactgggattctgatgacgaatttgaagacgaagtccctgaattgccagagataacggccaacaaaaaagtttccaacaccaaaatgaggaaaaagaaaggtgccatgactgacacgtcatcattttcaatgtcatcatctgcgttgttcagaactgaagggctcacattattagatgatagatatgaacagatgagcaaaaagtttgaacacgaaaatggtgagcaaccccacaaaccattcgacatgaaggaggaaagacacgatctagaagatatgttggacgatttcttggataattatgaattagaaagcgggggaagaaaactagccaaaaaggacagcgaaaagaaaaaattacagcaagctgccagctcagtgtctaaaggaaaagctgcaagaaaggtcaacgaagcatttagtaatatgaagatagaataa

SEQ ID NO: 6122 - DNA, 1845 bp, Candida albicans
atgacaagtctattgtttgcttttagtttatttttgtcgttttctgttgggtcgattttcccattctcaatatcaaatggaccagcagtgaatgatacgttacaaaatgccatccgatcacaacgtgatgtatctaaaccaattccaattgatcgagttgggttttctggagtatctttgagtttattcttcgaatctgaagggtatagcagtgattcattatctaatttgaatggattattaaaagaaaatgtagatggggtgatgattgacttatattggaatgaattcacttccaaatggcaactatgtccagctccttttccaaataatataacatatactactgctagtaatcgaattgttgatgtgctgtggaataacaaaacatataaatgtgaccctaatctatctactgataatatcatgtccattcttaatagcttcattcgtgataccaacaccgatgttgaagccaatttcatgcatgtcatgtataatttaaagtcgattcattatgaaaaatcaaatcaaacaattagtttggaaaacatctacaaagaaaagaattcgaatctcaatgttgttggaatggacactttgaatgatacagtaagtttattgagttcatatatcttcacacctacacttctaaaacaatatcaaagcacatcaaataaatataccaattcaagttcaagtattcgttacattgatagtcttaatgaaacacaagctatacaagacttttatagtcaatcaaccattcttatgccttctttacaaaccgttttattaactcaatacaagagattaatggttcatgtcgtaaccaatgacatggcagaatctagtcgatcttatcaaatcagttctagtgataaagatacaatatttttcaacagtgatctccctgctctgattttccacacagataatgccctggcagatgaattatgttatgaattatctgatgcatataatgggaccgatgtaaatattgcggaatttaataaagtactgttaaatgcaacactaagacttgttgtcgatgatgataaaactccattcacaacaaagagtttatcgaaatatgtgagatgtggatattgccccatattcaatagcaccgaatattcatcgcagaaagtaacagaaggtaatagtctgattatcagtcgagaatttgcatctaatcttttttggtcttgggccccagggcaaccttctggtcccgataactgtataaattgcacacgtccaacgaccaacaatacctcgaaacatagcgacgacaacggagaggaggaagaagaaggtaataatattgcatataaatgtgttgcattgacagaagaaggttgggaagtgtccaattgttatgaaaaatatttatttgcatgtcaaaataaattatctagaaatgaatggaaattaaacaactccaccaagagaaattattttgatattgatgatgatgattgtcctgaaggatattttttcagtttacctcgactgaatattgaaatgctttcattgatgactactgttaaacaagaaaatgtcaattatccaatttggattgatttgaatgatattacggtggagaattgttttgtttccggtggaccttatgctcaatgtccttatcaggaaactgtgactacagataaatttgtccgtatgattgctcctagttttgttgtggcaatggtggttttggttttaatatttattgaaaaagtgtttcgtaaaacaccaatccaaaccaataggaaacgatattggaaaaaggcaatacacgaatattatgctaagaatgattatgaaggtgtaccctcctaa

SEQ ID NO: 6123 - DNA, 3915 bp, Candida albicans
atgatggataatgaagcaaccataccttcatctttagcttctacagaagcggaaaatgtcgacacagagacaggaaactcagataaatcactttcccacatcaatcgatctagcaactttcctgaaactacatccaatcaattacaatcaaacaacccgtttcgctcatcaaccctgacagtatcggtaccatcactggagtcagtgccaatttctcaactaaggactagaattgcaaatgcagaattggtgaactatccattcaaaactttgaatagaatcttggatgatttgaaatggacaattccagtccaagaaaaatataatttcagcatgttaaacagtaagccaatagattatagtgaggaattgagtaaagttgttaattcgagtgtcatacattttgaaacattgattttaaataatgatttggagtattgcaagtcagtcgaaaaagtcgagtattccaatagtcaacaagtgctttatattatgagaggtattttgctggataagaagcacgggacttatcatttcagattagctgcattagaaaccgactctaacccttttgtaactaaactcattgataaacatcaatatcatgttatccccaaatccagcatatccgcacatgatttacaaattttgttggagaatactatagatgttgataagattattgatgatgcatttttcaagagtttaaactcaccaaatggtcaaatcctaagggtaacattgttcaaagcagaattcacccaagaagatttagtaccgttgacggacgaggagataatacgagaacggtatttagaaggaattaagagacacccaaatctatccccggaaacaattccaaaccaactccattgtattaaaactttgataaaagtgttacgaggaccggttactttgaaacccgaggacaccatcaaaacaattaacctcaaaaatacagttatggatgcacagatcgacgtcaatttactttttgagaaattgtcatttaccttaaatggggatgaagcagtaccaccagacttgaacaatttgccagacttgaaggaatcgtacataagaaaaatcttggagttgatattctttgcgaaaaatgtaatggtgccaaataacgagttccagactttgtattcattttccgacaatatgtctcaagtgtttcacacgatcgttgaatacgataaaaacgtgagtgtgagacatttcagtagcaattattcaaacagatttccatatttcatcaatcttagcgcaagtgcttatttctccgatgaattgataataaaatgtttcgagcttacagtgcagtctgactcaatcaaccagttatactatgtggattccttaaagcaaatacgaagtttcagaaacaataatgggggttattcagtaaacaataagcttgatatttatttcagacagagaaatttgataggctacagtgattttcttgagtcgatgaagatattgggattagcagttgaaagcaatgaaacagaaacaattgatgatgatgttattattgcaatgtatcggagccaatttaaaaatgatcccaagaattaccagtattataataatcatttgaaaagaattgctggtatcaaaaattccgagaaacttgatgattttattcagaaagagttgctaccaatcgatttagcacttgaagagttgagtattgaagagattacagaggatgatgttgtgatcactgcatacgagttcaagcttgacgagttattgcaactgaatggattcaacggcaatgctaatgaagtcatttttttgaataaggcattactctcagttgcagttcatcgaagaagttacatattattggagtatttggaaaccaaattacctgattacgtaaaaatacccacaatgaatgaaatgactactcgcaaggcatttgaaacacttgatattgatgtccaagctctggaatctgaaattatcagtaattttcaaaataaatttctcaagggaaatgtcgatattcggttgttgagatacgcattaaaattgattgctgaatccaagaaatcagagatattattaagtttcttgagaactggtaaaatagatacatcattactcccagcacaaaactggcctgctgggttagataatattgggaacacatgctacttaaattcgttattacaatattatttttgtataaaaccattacgagaattgattttaacatttaatgagaacaattttagtgctaatgattaccctgaaacgagaaagataggtgggagaaaagtagaaaatatggagcttcaaagatcaaatcaattcgtttaccagttgcgtcggttatttcaagaaatgatttatagcaacaaaagatgcgttcaacctagtaaagaattggcatatttatcttttcttccattgtcacaaccagttaatttcaaaaatcaaaagaagaccgattatctgggtagaactacaattgaggaaaataaacaagttcaattagctgaaaccaaggacaaccagagtgttggcacagaatctgtgcatggcgaacttgatggagtattatatcaacaatcagaaaatggactcagtactgataaagatgtaactatgactgatggcgatgatgagatcaatacagaagtaaaggatattatagacatggatagggaagttgaaactggaatggaaattgaaacagatgttgatgaaagcaataaaaattattccatggccgttgaatcacccctgtcgtcaagatctatgattgaggatgaagtagaaacccctgatacttcttcaagtgaggatgacgttgtgggatcgagtcccaaaatattacccatactgagtgatcaaattgaaagcacaattgaagttggtagacagcaagatgtcactgaatgtattgaaaatgtcacatatcaaattgagacagcattaccaccacagttgatagataaagatggcgaacaacacgatttaatcaaacaattattttgcggcaaaactaaacaaaccatcactcccttggataaacctgatgagccacctagagtttctttagaaaggtttttcagtttgattattaatgttagtgatcaccccaagagtatttatgacgcgttggattattactttaatgaagatgtggttaaattggatgaaggattagttaaaaaaagtattaccattctggaattgccacagattttgcaattccatgtgcaacgagttttatttgatcgtgaaaaattgatggcatataaatcaattgaaccaattccgttcagtgataagatttatttggatagatacttggataccgatgacgaagaaatcttatataaaagaaaccaagtgtttgagtggaaacgtgaaattctgaaattacaacaatataaatttgatttattgaaaatcgaccctgagacatcggtgtcattgattgatagtttgaaaatcacggaaaaatatcttgagaacaaaattatcctggacgattctttgagtattgaattgtctaccatacaaacgattaatgatgagatcagaaaattaacatcgaatttagaagatattgataatcgattgaatgaattgaatcatttaataagtatacagttccaagattataaatcgattgcatataatatatttgccgttttcattcatcgtggtgaagcaagctatgggcattattgggtatacatcaaagatccacataataataatatattccggaagtataatgatgaaattgtcactgaagttcctgctagtgaaatattcaatttcttggaaacaaacaccgctactccttattatattgtttatatcaaagaagaattagaatcaagttatatagaacctttaaaaagggaaattaaagaataa

SEQ ID NO: 6124 - DNA, 1977 bp, Candida albicans
atggctagaagacaaagatctaaacaaggttcaagctctcaaagtggtgttaaaggccctaactctgccttaactgagttcttacgtaatgaaggtattactgacgcgtttagacaacgtagacaacgcgaacaagagacagttaatgaaggtaatgaaaatgataacgatgctaatgaaccagagcaatctacatcagctgtggaagtgacaccagaagcgcggcgtcggagtacacgtcgatctgctagtgctccagtggaagacaccaaagataccaatgacgatgatgatgatgatgatgatgatgacgaaatcagagaaatgagacgtgctgctaaaagaaaattacgagcagcaagacgcggttcaacacgtcaacctcgaaatcgtcatgatcccgataatagtggtggtgacgatagtagtagcagtagcagtggcagcgataatgatggtgatcctaatttcagtgaagatgaagatgatttgggtaatttaaatatgagaaaatttggtgaacaagatgattgtgttgattgtggtcaaacatttgaattaaccgttagttctcgttttcttaaagaaaagaacggatatctatgtaattcatgtaatcaattgctcaaggcaagagaacggaaagcgaaaatgaaccaaatgaatgctcgtaaaaagaggaaaagagtggctcaagcattattaaataaaactgatgtgaaaatccccaaattacaagatgtttgtatcaaaaaaatcacggaaaatattgaagatgtggatgtattaggtgatattggacaaatgaatatgaatagaatatccatgattctatctaaaaatcgttcattaaataataaaaccatttcattatttttatctccagatttgaaaagtttacaattttgggattgttccaatgtcgattctgactctttgaataaaatagcttcatattgtcctcacttggaatcattgactctatttatgtgtggacaacttcataatgataatttacaatattttgctactcaactaactaaattgacagaattatcattaaatggaccatttttaattagtgatgtaatgtggcaagattattttgaagaagctggtaatcgattaactaaatttgaaattcgtaacactcaccgatttggaaatgattcattaattagtttattaacaaatgctggcagaaacttgacttcattaaaattgtctcgattagatggtttaaatgctgcagatgtatatgggatgattcctcatttcttactgccatcgaaattgactcatttggaaatctcatacccagaaaaggaagaattgatcagtgatgacttgattattagtatactttccattaccggtgacactttggtctcattgaatcttgatggttgttctgatctaacagaaaaattcttaattgatggtgtggcacagttttgtccaaatttaactcatttgtctattcaaaatttagatcaaattagtgatgacgggtttgcccaagctttgaaagaatatctgaaagtcaatgttggtggattattagaagtttatcttacaaaatgcattggattaggcgataaagccatttatgaattattcaaacattcaggtcatacattggtggaattaagtatcaattcattggatttgttgacgaaaaatttcctaagtcaagttttcactgaagatctgcatcaatttaagaaaagattacttcaacaattggaagaaagtcaagatgaagaagttgaatactataatcatataaggcttccattattgacatatttggatctgggatttgtacgtgctgttgataatgaacttttatctttgattggtgagagttgtcctcagttaaagataattgaagtatatggtgataatagatgtacgtcaaaggcaagaattagacccggtttaatggtaattggtcgtcaaagtgatgaaatttaa

SEQ ID NO: 6125 - DNA, 900 bp, Candida albicans
atgccagttgaagagcttgaagaccgtgttatcattactgatccaaatgactcaactaacagagccaccattttgaaatttggtgctactgttgtttcttggaaaaacaataatcaagaaaaattgtggttatcagaaggtgctcatttagatggaagtaaagccgttagaggtggtatcccattagttttcccagttttcggtaaacaaaaagattcaaatcatccaactttcaaattacctcaacatggatttgctcgtaattcaacttgggaattcttgggacaaactcaagaaagtccaattacggttcaatttggattaggtccagaaaatgttgatccagaaactttgaaattatggaattatgatttcactttgattttaactgttagtttgactaaagataaattggttacttcaattgacgtggaaaacactggtaaagaagcatttgaatttaattggttgttccatacatattatagaatccatgacatcaccgatacattagttaccaatttaattgaccaacaatgttacgatcaattgattggtgaatcatatatcgaaaaggcaccagttatcagtttccatgaagaatttgatagaatttattcaaaagtcagtttggaaaaatccattcaagtcgttgataaaggtcaagttcttttcaatcttcatagaaaaaacttgcctgattccgttgtatggaatccatggactaagaaagctgaaggtatggctgatttccaaccaaaatcagggtttcatcaaatggtctgtgttgagccaggtcatgttaactcaatggtctctttaccagctggtgggaaatggtcaggtggtcaagaaatcactattggtggtgagattaaagttcaagctaatatttattag

SEQ ID NO: 6126 - DNA, 789 bp, Candida albicans
atgttcaattctataagtcgaggggtatttgcatcttcaactagattcacaagagtagcaagatttttgcatcaagtgcccaaattggaatctcatgaaacatggactcaagaaggaataccaggttttttgtctccaaaaggttataacttggcatggaccgattatcaaaactatttattaactaatttaactttattgacaaatggaacatcactggaatataaaacaccatatcaaacattgttgcacacagccaagcaaactacacaacaacatgttttccattatgcatcgatggctcacaataatcatttctttttccaacaattagacactaaagaaaatgcatcgaaaaccaaaccatcgagatttcttatggaaaagttaatgcatgaagacattttggatcttgatcaattaagaaataagttgttgacgatggcagaaaatacatatggccaaggttggatatttttggtggaaacagaagacaaaaatttgaaattcatcaattgtcacaatgacggtactccatattattatgctaagcaacaattattagacttaaatggtggaatagatgaaggaaactttagctatttagagaatttgaaatccagagcattaaacaacgaaaaagattatactttaccaatattagccataaactactgggactatatgtatattccagactatggtgtaactggtaaatctgattatttgaataagttatgggatcacattaattgggacgttgtaaataagagattgttccaaatatag

SEQ ID NO: 6127 - DNA, 972 bp, Candida albicans
atgcaattcttaacttccgctttagttttattattatcagtcggtgctttggctaaaaacattttattaaccaacgatgatggttggcaagctaccaacatcagagccacttactacaaattgaaagaagctggccacaatgttttcttggttgctccagtttctcaaagatctggtttcagtggtaaatttgatattccaacttctccaactttacaaaccaacggtgaattcaattacccaccagctggtgctccatcttggggtcacgaagtcgatgataaccatatttggtatttcaacggtactccagcctcatctgctgttttcggtatcaactacgttattccaaaatacggtgacaatgttactattgacttggttgtttctggtccaaatgaaggtactaacatgtctccaggtttattcaccatttctggtactgttggtgctacttacaccagtatctacagaggtattccaggtgttgctttctctggttcaaactccaacaactccttcttcaaagatagcttggatttgaaagacaacaaagaaccatctaccatttacgctaacaaggttgttgaatttgttaatcaaattttcaaagctcaaggtaacaacccaagagctcttggtctcggtgttggtttgaacgttaacttcccaaaagttggttacgaaaatgaaacttgtactaatccaaaatgggttttcactagattgactggtcaatatgctgctggtgccaacttggtctacaatgaaacctctaactcatttacctggggtcaaaaaagttgggatggtcttactgtttgtaacaatggtgactgttcattaccatcagaaaactttatcgttgaacacaccaactgtcaatcttcagtctctgttttctcagttgactacgatgccaacttgggtttgacttctcaagttaaacaaatattaaaccctcttttctaa

SEQ ID NO: 6128 - DNA, 2748 bp, Candida albicans
atggaatcaagtgaactgatacaggaaaaccagttgaatcgatatattctcgaagattatgatcgaatgcttaaatctgtcactgagattgataacccgcaaagaaaatgtcatattttgaatgaagtatacaaaatgaaactaaaatattttcgcttaaagcaatcagaattgaatgattggctagaggcaattcatctaatggaagatactcatgaacgagtgttttcagagtttgagttttattcattgatttccccagattacaccaatgctgatgtgacaagcagttttctaaaacattttcaagaattcaaagacttggatgaatcaggtttcgaagcaaaactcctagatgctattaacatttcttgtcatgatttttctagaggtaatctaatatggaagcaattgatcgacgctgctcaagatgaatacttgaaagtaaattctgataccaatttaatgcatttacatcagtattaccttgacagattggccatccctcatgcccagcttgaagaatcctttaatgaatactcttcatttataagcaaatactacggtgatgattacgacaagtacatgaaatatatgaagtccgctaacaagatttactcatctacaaaaatgaaacagatttactacgaacagtttgagatttctatcaaacaatcacctgataaccctcaactatggatagattatatggaaagcgtttatagccaccaaaagaaaaaagatttgaatcctgttcttgccatttttgaaagagcaatactgaaaaatgaatcttggtcacagaattggataaaaatttggttagctcttatttacattatttatggttgcagtagtgatcagcgacctgaatggttacagtttgttttccaaaagtttttaaggacttttccgaattctaaccatgtctatgcggagtctattcgttattgtttgaccatgaatgataatgagatggctactgaagagtttcaaagtatagaatccaggttagaatctaccaaaaaattattgcagtgggatcatcaacaatggaaatcagtgcatttggcttttattcaatttaattatcaaatatcgaaaagatacagtatggacaacaacaaactgattgtggagctgagcagtaactccatatttatgcgtgcattatcggtaatagaacttggcgatccttctcattccgttgaatttctagcagttgatatgctaacacacatgggagcaactgacatggccaaagacctaatagacttgatgttggagaaatttaataacgaggcagaggttttgctttttggtttgaggtattttgtgagttataaaacagactttggtcaaattcgttcatactttaaaaatgcaatccataaactagacctgtttgaccttcctgagaaattatgtgacaaatggttggagtttgagcaactatacggagacataaacagttatatggaatcagttgcaaaatgtgaaattgctttaaaaactttgagcaagaaaagaactcgagatattacagtggatgaaaacaatcaaccctccaaaaaacacaaaagagaaccgacaaaggatattgacactgaaactaaatcgagagaaacatgcactgtcaaagttaaaaatattgcagctgacactgacgaacattctatcagagattttttcaaagactgtggagaaattggtgatatctctttcgtggaagctgaaggaattcgctatgcaatatttgactttgaaaatgagcaacaggttttttcagcattgacgaagaattataagtctttggatggaaataaacttgaagtatacagactacagaatgccttgttatttgttaataattacccttctactttcagtcaagccactgtaaaagaaatgtttgaaaaaataggaccggtagctaaaatcagatttcctaatcaaaccctgaaaaaaataaagagattttgttatgttcaaatgatttctaatgaagatgctcaaaagattattgatcagtaccatggccagaaatacgacgatccaaatctaggaggtgaattctcatgggaaattaagttttccaaccctgaagaaaaacacgaaaggtcgtcaccaataagtgcacgcaaagtgaaagttactagtatttcctttaacgtgctgaaagaagcttttgaaaagaaatttaccctgtgtggagaaattgaacaggttgtgtttccaaaagcggtatatgaagaggatgggaaattgaaaagcaatggtggtttggctattgttacttacaagactacagaaggtgtggaaaatgcgttaaagttgaatgattcgaaatggatgggtcgaaaattgtttgtttccaaaaaacaccagcatgttcattatacagcagaagattttgatggtgtgaaaacaattgggctttgtggattggacccttcattaaatttccagcaagtgaagacaatttttgaggaaaggtttgggaaggttgctaaagttttgttgttcccagaagacaaacaagctttggtagagtttgtgaaacctggagatgctggcaagacgagtatgagtaataattttgtgaaactaggcgaaagcgaagcaaaaatagtgaccaaggaagagataacaatgggtaaaagtgctatttcaaatacaactacaacttcatcggcacctcttacaatgattcccaccacagttagacgaaaaaaatctaaaaaatag

SEQ ID NO: 6129 - DNA, 1074 bp, Candida albicans
atgtcaaataacaaatccaaaaccacttctcagttgctcaagtctaagagtcccacaccggatgccactgatagaagatcacaaaagaaaaagttagtcaacctacaagatatagactcaattttaacccaacttgaaaccgaagactctcaaagagatagtaaagtcagaagagtctgcaactgtatggccagaagacacccattatttgaatttgcaccaaactgtttaaattgtgggaaaatcatttgcacaaaagaaggactacaaccatgctcattttgtggttccgatataattccaccaagagatcgtgatgccattgtcaaattgttggagaaagagaaggaggagttagttaccaaaaagcaagagctgtataatccatctctgcagaaaacgaaaaagaaaatagtcgtcaagatgaatgctggagaaaaattctgggatgcacaagacagggcattcaagttggccgaaaaagaattgcaaagtaagaaaagtacaggactagtagctgaaaatgcatccggtaccaaagagactaaagatcaagatttgcagaaagcaaaagaacgtctagaaaccttattagattatcaggcaacaggggaagagagaacaaaaattatagacaatgcgtctgacttcgagatgccatcgcaatcgttatggttgactcctgaggaaagggctctaaatttaaagaaacaacaaagattaatgagagaaagcttagtgaacaaggagaggaaatcacgtggggaaaagactgttgaaatgactatcaaagatggcaaagtaaccatggttgaaaagtacgttactcataccgaaggcacgtctcatgaagagtctgagttagaaaaatcaatcaaggagaaaaaaatgcagtcacaaactagtaatctggtctgggattatgaaatggacaaatccaaatgggagaaacccatatactttgccagcaaaaacatacctcaagttgacaagagtgaattgaaaattacgaaaaatagagtgcagtttccaaaagaagatgcatctgaagtgattgcaacagtaataaactag

SEQ ID NO: 6130 - DNA, 867 bp, Candida albicans
atgcctttgattatatttaccgggtatccttgttcaggaaaaacgaaatgggcaaaattgcttcaaaaagaacttgagatcaaaattcagacagcaaaagagaattctgaaccgggccaaaactataccgtaacttatcactcagatgagactttaggtataaaccacgagacatatcaagactcgaacaaggagaaattggcaagagggtcacagatttctgctgtgaagagggatatatcaagaacaaatattgtgattttagatgcattatcatatataaagggatttcgataccagttattctgtgaagcaaaaggtaacgtaactccgcattgcattgttcatgttattgctcctattgagaaatgtatccaatggaatgacaccaaggaactgggaaacaaatgggatccagttttgatgaaacagttgcagatgagatatgaagagccaaatagcgatacaagatgggactcccccttatttactatactttctgaagatccacaagagaaaataccaattgaagatatctggaatgctttggttttgaaaaaagcggcacctcccaacgcagctactttagttaagccaacttcgggtaattcgtttttgcaagaattggacaagaaaacacaggaagtggtaaccaaaatccttcaacaacagcaaattacccctggggatgtagtaatagataagaatttagtagtggccattcctacaggaactgccagtacagctcaactccagagaataagaagatcttacattggtctaaacagaatgagatcgatagacgttgatagaattgtgccattgtttgttgaatatctcaatagaagcctaaatagtgaagactaa

SEQ ID NO: 6131 - DNA, 2121 bp, Candida albicans
atgattaagaaaccattggcaactatgccaacattgaatagtcgaagaatacggttagtcttaacattgggtctactattgctatgtttaattaaaaccattcatcttaaattgacatcacctttaaatcaagcatatttagaatatcaagcattacaattacaacaattgagtaattttaacccgaaaaataatttaatagaattatttgattatttaaatacttggcatattaataatactttaaaagatcatcaacacagcaatccaaaatatcaagttgataaagtatctaccattggtgattcccatggagtttatttccattgggatgattgggttgatttatcccttggtaacaaaaaattagataaagtacgacaacgaaatagtaaagggcaggatcacctggatgatgatgaagatgaagatcaactagaggtagatgataatgaatgtgatgctagtttattacattatgctaatgttaatgctcatagattagaatcattagaaacaaaacatattcgaggtcgatgccaactatattgtctgttcccaatacctcaaagaattattgctactactgacaatttatttattgaaatacccgtgattggcaaaaaacgacttggcatacaagttagtactactaacaatgataaaaagtttactacaactacgaaattggtttccacaatggaaaatttacaaaataatttccgccaacactaccacaaccaacaaaaccttcatacctctgaagaacctcaattgctaattagaaacataacacgattacaaccaaaaattgataatttatctgttaaagattttgttttcaatatagattcagaaattgaaaaattacaaattgctaatctcaccactgaaaatggactcaatcaaactgatttgagtcgattgaatttttatcaacaagctaatgcattagttgataaaactgatagacatttcaaatatgcttgggtatttactgatattattcaaggttatacccatcatattgcttatccatttttcaatcgttacattagtgatagagaacgacaatcagtattacatcatatgatccgtgtatggtttcaattaatggaaacctatggatataccagttggatcaattatgggaatttattaggatggaaattcaatggattgaatatgccgtgggatactgatattgatgtacaaatgccaattgttgaattagacagattagcaatgaatttgaatcaaacattaattattgaaaatccaagatttggtaatgctagatattggttagaaatatctcctagttatatacgtcaagggaatgggaaaaatcatattgatgctagatttatcgatattcatagtggattatacattgatatcactggattatctactgaagaaatgatacccgaaccagcaacaacaacagcgacaacaacaaaaggggaagtaaaccaatctaatgaggatgaaaatgatgttgcagcctcttcttcttcaattgctgtgcattgtaagaattggaattggcataaattgaatgaattattacctttaaaacaagcatttttcgaaggttcatcagtttatattcctaataatgtatcaaccatcttgttgaacaaatatggcgatgatgccttgagtgattataaatttcataatcatatttattatccagatatttccatgtggataaataatgatatttgtcaattagaaagaaatactggggtgattggtggtataaatcttggtgtcaatattaaaaattggaacccaactactaatactaataataataacaatgaaggagaagaaaaatcgcctatagaatcttcatgtgatttaaaatatattcaagatgaatataatattattaaagaatcagtaatgagacatcaatatttggaaaatttgaatcttgaagataaacaacatcaacatgaacaacaacaacgccaaaaagaagaaatgattagtaggttgaataatttacctatttttagaaaagatccttgggattattattatgatataaatcataatttagtcactaatgatcgatggtatgttaaaattgaagaagttgctgtataa

SEQ ID NO: 6132 - DNA, 3705 bp, Candida albicans
atggatttgttagatgggatagaagactattcagctagtcaattcaagccaactcaagttaatgctatggctactacccaacaagacaatgaaaactcagattctgataatacttctcaaactcaaccaaaccaatcaatattaggatttgattttaatatcacaacaatatctaaagcactcaattcgactaatgataaccaagacaagggtgatgatgatggtatgccaaatctaagtattttagataaagttaagaatagattgttaggaggcggtgacgcgtcggatgaagatgagaacaccaatccagatgatgaagttctggataagacccagaagatagttcatccatctactggctctgcatttcaattactaccacaactagaagtagatgaaactgaattttccaataatctgtcaacacaggtcataccaaagatgaaaccaacccaaaagattgagacgttttatgatacagataaaacccaagtcattcctaaactcaatgatgtggaaagttggttcacctcaaaagatcaaactcaagaggatgcagataatgtgatatcgtcaaaacctttatccaaagaagaacgagaagctaaaattgctaaattggccgaacaaaaacgtcgtgaaagacttgaaaaggaaagacaagaattggaacaagatttaactaaaggtaccataactgatgaagaagaagaattgaatcaagaagctaatgatacagttgtttcgtcacataataaaagtgatggcttatctaccaaggagttggaaaaggctcaagagtttttgaatattcaaaaaagacatgtagatattcgacctgaatttcaaaaaaaagttgtctttacaaaagataaattgttatcagagttttcagaagaagaggattgcggtaccaacgagagaaaaaccaccaaagataaaccaccttcatcgccaacagttgaggaaatcttgaaatcgagtccatttacatctccagtgaaagatgaccataatgacgacaatgttttagatttatttaaaaaaccaagtgaaaatactaagaatccattggaattatatgcacaaagattgaaaaaacaacttttcagttcaccacaaggtcaaactgatactgcaaaaaacaatactaaacattctaagaaattaatcaatttagattctgattctgatattgatcttgcatcttcatctccaacaaagaaacctccaattgccacgagtactagtattattggttctggattaaaattttccaatcgtgctaaagaattggataatattcctgaactcagtaaagaacaacgattattaataaaacaaaaattttcgaaacggaaattccagaattccaaaatcaagactaatcaactgaaaaatcataatgttagtcataaacaagataatgggtttatgcaaaaattgcgtgaaaaacatattaatcaattgaaattgaataaattaaacaatcctgatcatttaattatggaagaattggaaaaagatgaagaaacaatgacttcattattggaaagagaaatggaaagggttagaaatattcgtaaacgagaaaaactacaagaacgagccaaattagcattattagaagggaaattagggattaaatcaaacaatgattccgagaaatatggtgatgaaattcctgaaagtgatgtagctgattctgaagtccctgatagtgattataatatggataatgatgatgatgatgatgatgacgaagatgacctggagaatgaatcaccgaaaagggctgaaattaatcctaggagtgatgatagttacatgtttggtggtggcgacaacgccgatggcaatggtgaagatgaaggagtaactactactttatccacacaacctcaaccagttttcgataatacatcttttgttgataaaaccgaaggacttttccaaaatttacaaccaagaacatcaaaagaagattcatttatatccacacaaggtgaagaaagtcaattgcaaattagacttccactgttccgtgaccttacacaagtgccaacacaaactcaagttgatcaattcactcaagttgacgaacaagccactcaagccgatgatgtggcaactcaaaagattctagctgctacccaaaaaataatggttcctactcaaaaaatcaaaaatgatactcagattattaacaaaccaatgctgcaacgtccagccaatagtagcacgaagagagatgatgatgacgttgatgatgacgatgatgatgatataattacacctgcaaatgttcgtcgtggtcgtaaaatgatccggaataataatatgattaaaatcgaagaagacgatgaagaaactccatcaaagaataacaatgatcataacccaaaagaagaagaagaagaagaaaatgattctgatgatccagaagaaatacaacgtcgtattaaagaatatgaattgaaaattcgtaaacgagaattaaaattacggaaacgtagaaaagaaatggaacgtaaaggaatgaaaaatattgttgaaggagaagcagaagaatctgaagatgaatggaaaggattaggtggtattgatgaagaattttccgacgttgttaattctgatgatgaaaaaatgattgataataattttaatattgatttaaaaaatgatgaaattcgttcaaaattcatggaagaatatcaaattaaagatcaaaaagaattagaaaaattattagatgatataaagaatcatcgattaattaaacgaactggtataaattcaaatggattagatattgaaattagtgatgaagaagatcaattattagaagcttatagaaaacaaaaatttatggaacaacaacaacgattattacaaaataaaaaattatttgaattatataaaaatgaaaaatcaaaagcttttttcaattcaattcaagataccgttgaagtgataaaaattgacgacagtgatgatagtgatattgaagtccagactaatccattcaataagggagaaaagaaaaattctgggtcagaaactgataaggataaccaaggtgaagaagacgaagaagaagaagactcactagataaagaagcaccaattaagaaaaccatcaaagttgatgaagcatttattagaaagaaattatcatttttatattcaactactgatgaagataaatatgaacgattacaaagaatttctcgtattcaacatggtatttctgatggtgaagaagatattgatgatataaatgttttaaaaacaaaatctttcaataatttaactaataatagattgactcctccagttttagaatcatcatcacaaccatccaaaaagaggggccatgaaaatgacactgatgttgatgaagaagtagatgaagaatttatgccagttttcaaaaaaccatcaattgtgaaatcatttaaatcatttcaagaacaacaaggtattagtattaaagatggtaaacatcatttctctggtgtcacaattagtaaacaatataaagttgttgctggatctaaagcttcaattacttatatgtcgaaaaataataatcataataaaaatcaaatcaaaaatatcaaagaagagaaaattcaaaaaagtttgcatctgtcaagacgtgaaaatagttcatttttcgatgattcaggctttgaatag

SEQ ID NO: 6133 - DNA, 516 bp, Candida albicans
atgaacaaaggattaactataactgctattgcagctgcagctattgcaggatacgctgtatattttgattatcaacgtagaaattcagccgatttcagaaagtccttgaaaaagagagaagtcaaacaaaagaaattgaaagctaaaaaggaagccgaatccaaacaaaataaattggaagcagtcaaaaaggccttattggaagatttagctcaaaaccctattccaactgatttgactgaaagagaagcattttttatggaacaagttgctgttggtgaacaaaaggcaaaagttgatgccattgaagctgctatatgtttctataaggctttggcagtttaccctaatcctactgatatcttaggtatttaccaaaaaaccgtacctgaagaagtatacgaattggtcgtgatgatgatagctgtttatccaccagcttctgtttctagtattttgaataagggagcaccaactgtcaaagatttgaaaccaactgaagaagatttagattag

SEQ ID NO: 6134 - DNA, 1095 bp, Candida albicans
atgactatcaaacaaaaggtattatttttagaaaaaccaaacgtcgatgatctcaaacaatttgaagttaaattcgattgtatatattatactttgtcaactttagagcaacttctcattgatttccgaactagtcttaaagatattgaaggaatatattgtggttggaatgggtttggtgtgtttggagggtttagaggtaaattacttgttcacgctccccgacacttgaaaatagttgcaacatgttccgttggttacgatgcttttgacattgaaggattatcagaaaggaacattattcttacaaatgttccttcaccatttgcttttgaagctgttgcagacttggcattgtataatgccattactagttttagaaatttcaagttatatgccgagaatcttaataataatcaatatgctcactcaggaatttcaagaacatctatgcttcatggtgaatttgatcaaagttctggaaaggcaattgttgaaccagtggttggacatacttatgggtatgcctgttgcaaaagagataatttatcacctagaggacacaatgctgtaatagtcggttttggacacattggtgaactcattggaagaagattagcatgcatcggcatgaacattcattacgttaaacgaaccagactttcggaatctcaagaaaaatcattggggtatgaagtgacttatcatgaaagtttagaagaaacaaaagatattgctgacttgataattattgcttgtccaggaactccttcaaccagacacatgataaataaacagttaataagtagtatggaaaaaccttttagaatcatcaatattggaagagggtttgtaattgacgaagatgctctagtgggagggttaaaaagtggtaaaatattgtttgctggtttagatgtatttgaaaatgagccaaccatacatccagacttactcggtagagatgatgttgtgttaacaccacatattggttccggtattgccgaaaattataggttcacagcacatgaaagtatgaaaaacattgaaatcacacttcgaggatacgacgaaaaaataagtagagtaaattag

SEQ ID NO: 6135 - DNA, 2355 bp, Candida albicans
atggatgacaactatataaatttaaactttaatacgttggatgatttaaacaatatacccgggaaactagaagaattgaatgatctacaattgcaacttaaagatatcgcagaatcaaaaactagtggtaaaaaggactctgtttcgggttcaattaccaaagtcaacaaagaaaagttggaaaacgcaattcaaaatctaacattagatatcagtaaatttgattttgttggtgaaaatgattgtttaatggaatgtgacgatttgcttgaaaaatacgggcaattaccagttttgttagagttaaaaacactcttacagacaagacacaatgtgtcaacgacaatcaacagactaaagaaactccaaacaattgatgcaaaattggatatgagtttaagtttaaccgaattgaagaatatttatgaggagatcaacagtttaaacgaaaaagacaatttactcgaaaagtttaacagtaaattcaacaacaagagagatgaattgatgaaacaatttcaggaaactttaaaagaaaacaaatggttaaacaactcaagtattcctaaccaagcattaacattaatttccaaacaattcaacgagctaatttgtttgcaatcaatcgtactgatacctgcttatccagaaacttggtgggggttagatttactattggagccaattattacaagattcaattaccatttcaatagtgtaaacaaagaaaccaacaaactctcaaaacctgaatgggcgctagatttccttgagaattttttacatgataatttaggtttgttaagtataattgttgacgacacattcaaacccttaaatagaataggcacttatgaagtgataacctgtttgttagtcccgttaagaagtaaagttgaaaacatgattgacttgattaacaagagagtcactgataatgatgacaccgtatcacttgaaaagaatggtaggatcttgtcccatttggttttcgaattgtcttcttttgaccagaggattaaagcaaaatacaaatacaatccattcataatagattttgaaactgtcccagaaaacaagtggctaggaatcacaagtgatatattgttgaatgatctgaatcatgctgctaaaaagtggttagaatttgaaaacagattggcattgagaaggtttgacaacgagattattaacgcatcagacgcattttcaattgaccacgattaccaaggtcttaatcatgacaaagaaattaacttgcatattttgaggccaacatattctgcatatggtttagtgaaattgataagcaacttgaattcgcatttccaaacattaaatatagtcaaataccagttacagtttgtgtcacgaattcaattggggttgatagacaaatactatgacattatcaagaaacattacaaagagtacaataacaagtacagttttaaaaatgcattgaatatgattcccggagccatggttgatgaaagtattaacaaaaacaaacctggaaatgacagtactattaatgaacacaccaaaaacggtatcactttgttaactgaaattttttgttctgccaagtacataagtgatgcattagagaattggagtaatgaattggttttcattcaattatggtctacatatacagggttatcagcagaattatctgaggataaaagtatatttgattctgcattgaagcaatatgatgatttggtaaataaaatttccaaaagttatgaagagctttttaaaagtgaaataaaacaattgttgaaaaaatatgtcaatctaagtgaatgggactcgccaagtactgctacacggtcggacaagaatagcgaacttgagccatcggcatatctaacacccttgatcaccttattgccacagtatttggacattatatctagaagcgtatcacaattggattattttataatcagcgataatgcagtttcatctttgtgtcagatattgtttgaatatgttttaacaaataacgagtttaaccgaaatgggatcgatcaaatgcttgttgattttgaatacattgttaaatttttgcagtactcgttgaatttgaatacactggatacttacagtgaagcttatgagtattcaaatgatactaattccgattatgtcaagattgtacaagcaattgatttgctagattcagttgatcctgatatgataaccaatttcaaacaagaaacactggacaaaaatactgcccaacttaatgaatttgtcacaaaattaagattgaaatatcaacacgaacttaaagaattgactaattacgatatacagaatttattaagtagagtaatgtattga

SEQ ID NO: 6136 - DNA, 1326 bp, Candida albicans
atgcttcaaccgttatcaattaagtctaaactaggtttgggcttgcttttatcatatacttcatatgaggtttatatgcaagtgaggactcaatacattatcaaagcaagaaaagaagagtacaagaatttagaaaatggaactgatattgatatatctaaatttagatcgacttctgttggaggaatgtttgtcaacccatttgaggaatatcgtccccagacagcatttgagtttattttagtgaggattatgcaactttttgaaagtgtttatggtaatacgatcgagcttcataaaaaactcccacagccacatgatggtgccgttgaagtggaagatattttaaaagtattcaagcctgatttagagagatttagaaagaattcagaagttttaaaaaagtgcatagaaagcaataatttcctgcaattaaaagtaaagccaagttggtttaattcgattcccttgcatcaacaattacttttcacttggttgggtcaatcttgcaccttgtttcaaattctgggagttaattttttaactgatcctataattagtgaacacttgatcactccatctataggacccaaaagattgactcgttccccaatggatttggaccagattaaatttgcaactaatgacagcttgaattttgttttggtatcacacgatcaccctgaccatttagaattggatttagctgggaaaatcaaaaatacaacaacttggattgtaccccttggcttgaagtcgaaattggctcgtaaaggtatatataaagttattgagatggactggtgggatacaatagacattactaattatatcagtgataatttgtctgacaagtatgaaatcgagtgtgttccttctatgcattggtccggtagatatgtgattgattctaaccaatctttgtggtgctcgtatgtgattaaacgtaacggagaatcactagtgtatcatgcgggagatactggttatctgaaagaactatttgatgttataggtaaacgatgcggtccaataaagttggcattgttaccaataggtcaatattgtcctagctggcaccaaaagcctcgccacatttcaccagaagaggccttgcgtatttgctcgcaagtgcaggcatcatttatgaaaggtgttcactgggggacattcaagttgagtggagaaccaattttagaaccaaagaatttattgactgagctagcccaaaagattggaaaggcggaaacttatagagttccagaatttggtttgacatatctttttgatttacaaaacaatactgagacagagattcatgtttag

SEQ ID NO: 6137 - DNA, 6504 bp, Candida albicans
atggaaaattttgatcaaatacttgatcgttttgaaaaactggaagtttttaactatttgactagtttaagtgcaaaattatctaatgaaaatgaaaccaaatcaattcaagagtccgattatttgatttatttaagtcaattgaatcaacttgtagaaaaagccaatatcaccttagatacaaaaaagaagaaactgactacagaaaccaccaaccccaacaatgaatcaaaacaaactagacaagcaatttcattcaatatttatcgattagtatcaaaaaattatatactggttttacataaaattccatctaaaatttatgatttgggtaatcaattggttaataatttggttattgatgataaaggtgaactttctcctataactcaagtatcaattattattttaattgatttatttgaaaatttccctaattcattggggtcattaatcaatttttcaataacccaattatacaaaatattaaagaaatatcccaacatcaatagtaatttgatttttttgttgaattcaattacaaaaaatgccaccaaattggatattgatgataaaatgcaatccaaactcatgaaaattgtcaccaaagggattatcaatgaaactatatcatataatatggaaattgaatgtacttcaaatgtattaataaagaaaaattatgtgttatgttataaaaatttgttgttattgatggtttcaacaaactatgaaatgcttcttgctgcttcaacatcatcaacttctgctggggcgaaaatgaaaccagaaactattatgaaacaacaacatgattttcaaatgaatttattaactactaatgaaaaaattttcaattattgtttatcaaatttttctaaagaaatcagaattgccatggttgaattattagcaaatttattgattaattttgtccccacagggaaatttaatgccattgaatatcttgtgactctttttcccttgccggaatataatcaatgggattccaatcttttaatgaaagttggtgaaaatggtgaacctatagttgatattagaaaagagaaaaatactttaatgggtcatgatagtgaatctattataaattcaagtttagaattatcattatttcaagctagtgtcacagaaacaattattttttatttacaattggaacaatttcaaaatcttgaatttttatcaaataatttaacgtttattttagaagtgatattagcaaaatttgttgaattaaataatatggaaaatcattttatgaatcaagaatggaataaagttttgaaatattggagtacagttatagaatacattgtgcaagagactggttccgcatctcatgaagtgctttgcagttttatttatggtaaatttgtaccggattcaaataatgaagatatttcttcacaagatcaacatcaacaacaacaacaacttgttagaactcaaagtttaaacaaacaaagaaaacgggaatcgaaaatattttcatttaaaacaaagcaaagttcgaaaaagaaaaatgtatctaattgggaaattaaaccatatcaaaacccataccaagcctattttttgttgtttataattgatatgttattaccatatggtgtcagttttgagtcgttgaaaaaagatgagaaaccaacaaataaggatattccagtgggagaagaagaggaagaattagaattggatctcccccacggttcgtcagaaacggggtcatcatttataagagggatattgcttaatttgattgtcaacaataattactatattagaagctatgcaactcaaacgttattagtatatgcaaagaataatcaagcagagataaatcaattgattttacacacatttagattggtggatcaagaacacaaacattcagataaggagacacctggaggagatcaaaacatcaatcctatttcctctgtcagattattgggttactctttagcattactgtcattaatcaaacaaacagatcctgcgttacttcaaaatctgactatagtcaaagtattgagtttttgtacacaaagtttaaaacataatactcaatcaggggttaagaattctagttgttggattatattatcatcacttgtcactttacacaatttttccgaatatgttaaattaaattcatcacagtttcttgtgttttggaaaagtttattaacttcacagtttatgagtacttcaataagtgccagtacccctgaggggcaaactaaagaagtaatttttaatttaatgttgagaaattttagtttggtttgtttattgaattatttgaattcagttgaattgacaccagaatcattaaaacaaattcaatttttacttactaaatcatacaattatttgacatatcttgaaagcaacattgaagtagttggtgccgttactttattcaacaatactaatttcaatgagttggattataatgtaaacatgcttagtaatttgctttacaccaattatgcattcaataataaattatcaaccgacagagtatttataagtctcatattatacagtaaaaaaatcattttccaaagtttcaccaaattggccactttgctcaaaaatgaaataaattccaatatggtgatttttttaatcaaagtatttagtgatgccaaattattttcaagaattccatcaacagacaatgaaaaatccaaatctaaatccaaaacacttaatcaagttgccgatatagctgataatttggtattgaatgaagattataattattcatttggggttacaagtaaattacaacatgaatcgatgaatatagatgaattattgattaaatttccattccaatttggtattgaagaaactcaatggttgagaaaaacttttacttttgcaactacaccattacctaaactgtctattgaaagtgaatattcattggaaactgggtcatggtttgattattttgaaaaaattgcgtttctgtcagttgatcattccataaattatgaaccaggaattgttttaacacaaaattattctactcattataaatatctgaccaatttaaccacatctttggttgatttatcaattgaattatttcaattggttttcccttatttaagcacgaaaattcaattttcattacttgaacaaatacgtaattcattaacatcaagttcaattgatcctttaagattgaaagccatacaaataaatgtttctgttacattacatggattgatttcaaatattgtgaaaaagaaaattgctgttgaagaaagtattttacttgttattattgatattgttaaaaaaatgcccatggaatatgatcaattaatcattaaaatcaatgcctcaactttaggtttagtgggccaattacttgataaaaatggtgttagtggacaaatcacaactttgataaatgatatagtaactgatctgaatccatacaaaagaggattctccttgttggcactttcgtatatttattcaaataccaaattaggattttccgacatttatcatatttctttacaattattgaatgatccaaatcctatagtttatcatttcacaattatttccacgagacaattgtttgaatttaatcatgataatttactgttaataccaaccgttttaaacaaaattttttccaattatttaaatgattcttttggttatgatttgtctaataaagttttagtcaatttagaaaccaaatataattccattgccgaaataactaaattattgaaattatttgttggttcattgggaccagcattacgtgattgggaaatcgatgagaaattgaaattaaaagacatgattatttcattaagttatggaatagggttatcaactttaaatgattatgttgaagtttataaacaattattattattattccaagaattgattatatatgatcctaatttaatggaaggagaaatcacatttttccgagatttgttgaatttaatcatttctaaaaatttgaaaatctcattagctagtgtttctccaacttcattgaccaccgatacaattttcccatttaatactagttttgatttatattctggtgcttatgaatgctattacgaattattgaaaatacttggtgttgacattttgactcaagatactattaatttactttgggtatcgatgaatattaaaccttgtttagaattgaaacaatttatcaaattatggttagaaagcagtttagacaaaaattggtttgctatattaaattctttattcaaattaagttccaagaaattgattggtccatttatcgaaactaattatcaacaaaaattgttacctttactgcaacgtcaaaaaaagaagaatgcacaaaatgttgattttagagatgaagaaattgaaaatattgttggtggtgatgaaagttccgatatggataaaaatgaacctatatcttgggaatttaaattgttcatttatgaaatgttaaatcatttgttggatttagcactggggaattcacaattaatcgaaagattgaaactgaaaattcctgatattgtcaaactttcatttttaggatcaacttcttccataacagaaataaaattaaaaggtattgaattgttgaatagatcattagcgttatttggagaattagaagatccattgtatccaagtgtttctattttggaacaacaacaagcacaaataatcagtgcattaataccttgctttagtcctggtaatgattataaagttattgtcaatgccatcaatgtgtcttccaaatttattaatcttccaagaattaaattctattcaaagcaaagaattttgaaaactttgatttatttattagaagaaatttcatccaataaatttgttcgttttggatttttagaaagcatgtcagaatttggtagaaaatctattcaattggcaattttaaattgttgggcagtattaaaaattgattcttatgaagatccagaaaatattgaacccgagtttgaagagacattaaccaattattcagcattattgacatcactttggatattggtgttacgagaattttctacattgaaatatagtgaatcatcaagcagagaattggagatttatggtaattattggataaatttgattagtatattgagtttagaactggaacgtgataatgaatttattaatcaatatttaccaggtgatgctcagaatttctttttcattttgttcagtcaatgtatggaatctttaattaagaaccgcaaagttccagagattttgacttcagtgaaaagattagttaaaaatccaacattggttacacttttatttaatgatgaaatatttggagaaattgttgatttattcgatagattaattttaattgatgatgacaccgaaattcaatgttctcttgtggaaattattagtagtttattccaaacatttgttcaatgccatcaagataatttggaatgtggatttgataagttgtttgagttgattagaatttccatgttacctttattccgtatattaccctttttacgttcagattacgatgccaataacgaaactaatcaattgttacttaaacatgttggagatgcagcgaatttattaattttgaaaaaagctttagaaagtttattgaaaatgattgatttactcccgacaattgttagaactgatttatattcttgtttgttgtatatcttgtcaaagatttatgagagtcgaaataaattactaatttccgtggttgtgccatttttgaaaaaaattgttattgataccaaagagtgtgctcctgaattaattaatattttctacaaaaccatccgtctgtattttgaaattgaagtagaaaacaattattctattataacaatgttaatacttgtgactaatggtgggttaaccttaaatgcagatgaatctcaaaaattgagtaatgctttgttgcaattgttggaaagtaaagatacagcacctactggaattcagtgtattaaatcattaatacaactttcttacgtgctgaaggaaaataatttggtggtcaaatttttgattagtgatctaataaaacacattactagagtaaatgaaactaatcatatagatttgaaaattgccattgaaatattaatgttgtttacaagattggtgatcaatgatgaacagaaacaagtggcattatattctataatcattcccgtgttagttaaatctgtggatgaagttgacaatttatatttacatgagaaattgattgtcttggtacggcaaagtgcaagtagctttaaacaagttgtcaacaaatatctcgatgacaaccaaaagaaactaactgaagaaattgttacttcaagtgttgcaaaaaacaccgttgctaaccaatctgttgattcttttgatcaagttccagaaattcaattaaagacatttggtgtatag

SEQ ID NO: 6138 - DNA, 1728 bp, Candida albicans
atgagagaaattgtatgttccgtttattcccttccttacaccaaatcattggaatccttatgtgttttgttgttgttgtctgaaaatttttggttctgttttacgcgcctttttcgactaaattgattcaaataggattccctaaatgattaatgatttgtgtcaatcaatcaatgttttattaagttttatcaaatatactaactgcttttgcccttttttttagattcatttatcaactggtcaatgtggtaatcaaattgtatgtataaacactgaagaaaaaaaaattctatcattgttatgttgtgatctttgatctttagttgtcgggttaacacctgccaattggatcaatacatcaatcaattaattctaatcttgaaaaaaaaattgattttactaacaattttttcttttatttagggtgctgccttttgggaaactatttgtggagaacatggattagataacaatggaacttatgttggaaataatgaacttcaaaaatccaaattagacgtttatttcaacgaagctacttctgggaaatacgttcctcgtgccgttttagtcgatttggaaccaggtactattgataatgtgaaaacttcacaaattggtaacttgtttagaccagataactttattttcggtcaaagttctgccggcaatgtttgggctaaaggtcattacactgaaggtgctgaattagttgattctgttttagatgttgttagaagagaagctgaaggctgtgattctttacaaggtttccaaatcacccattctttgggtggtggtactggttctggtatgggtactttgttgatttctaaaattagagaagaattccctgatacaatgatggccactttttctgttgtcccatcaccaaaagtttccgataccgttattgaaccatataacgctactttatcagtccatcaattggttgaaaactctgatgaaactttctgtattgataatgaagccttgtacaatatttgtcaaaacactttgaaattaccacaaccatcttatgctgaattgaacaatttggtttcttctgtcatgtctggtgttactacttctttacgttatccaggtcaattgaattcggatttaagaaaattggcagtcaatttggttccattcccaagattacatttctttatggttggttatgctccattgacttctatgggttctaaatctttcagatcagtcaccgtcccagaattgactcaacaaatgtttgatgccaaaaatatgatggctgcttctgatccaagaaatggtcgttatttaactgttgctgcctttttcagaggtaaagtatctgttaaagaagttgacgatgaaatgcacaaaatccaaaccagaaactcatcttattttgttgattggattccaaataatgttcaaactgctgtttgttcagttcctccaaaagatttggatatgtctgctacttttattggaaactctacttccattcaagaattatttaaaagagttggtgatcaattcagtgctatgttcagaagaaaagctttcttgcattggtatacttctgaaggtatggatgaaatggaatttactgaagctgaatctaatatgaatgatttggttagtgaataccaacaataccaagaagctagtattgatgaagaagaattagaatatgccgatgaaatcccattagaagatgccgccatggaataa

SEQ ID NO: 6139 - DNA, 4476 bp, Candida albicans
atgtctaattttagagatagttctagtcctcgaagaggctattcagaatttgatcctgaatctggtgaaggtttaggaagaaagaaatcattaattagaccagaaagatcaagaatggatgaaagccatccacgattccattatactcaagttgcaaatcaagaatctaatcatattaaagtacagccatcttcaactggtgttgatcctcgtaaatcaaatgaattatcaacatcaagatcacatttgagtaattacgctactccaccacatcaagaggaagaagaagacgaagggatccctttaatggatatacacaatgcttcacccaatgttagcagtgaccaaaataatgatctaaaaggtggacgtgaagtttatggattaaatgatgaaatcaacgattatggtagttcacccaagaaaaaccaagtcatttcatcttcaagaccaatgaacaacgaaaaaccagctaaacctaaacatgatatatatttctggaaagtttattgttatgctattacattttgggcaccagctccattattgaaattatttggattaccaacaaaagatcgtcaattcgcttggagagaaaaaatagggttgatttcttgtattctttacgttggggcatttgttgcttatttgacttttggtttcactaaaactgtttgttcgagtcaagtggtcagaacccaaattaatcatgtcaacggaggttatttgattatcaatggtagagcttatgatttgacttcgtcacaacatcctaaagcagctggtatacaagcaggttctaatgttttatatcctcccatgaatgccggtggtaaagacgcatcatttcttttccaaaatgttaatggtaactgtaagggtttgattaaaccaagagataattgttctattccctacgatggtgatgaattggcttggtatatgccatgtcgtcttttcaaccaagatggttcaaccaaaccaaataacacatttgcttattataaaggttgggcatgtcatactagtgagaccgctcgtgatgcctactacaaattgaaagtcaatggtgatgtttatttcacttgggatgatgtcaagaattcttcaagaaacttggtagtgtattctgggaatgtgttagatttggatttgataaattggattgaaaccgatgatgttacttatccggaattatttgacaaattaagagatgatgaaacttatcgtggattggatatatctttggttttgacaaattctgaagaacgacaagcagctagatgtttaaccgaaatcatcaaagttggttctattgatacagatactattggttgtattgcctctaaagttgtgttgtatatgtccttggtgtttattttatcggttgttgtcgtcaaatttattatggcttgttggtttaaatgggtcacttcaagaaaacagggggcaacaatgtatgattccaaggcttgggccaaaagaaatagagaaattgaagactgggtcgatcatgatcacggtattggtgctgaagttaagacagtgcctgtgaaagctagagccaattataaagcagctaaaactaatagacaatctgttttccacagagctcaaaaattgtcattgggaccaaatgccgatttatcacaatattatgataatccaaatgctctttccaagacttttaaatataccactatgtctacccaagcggcattgttaggacgtaacggatatggtaaacgtggtaataatgccaataaaagtgttagtggagggtttaatggtagacaatccaatctttatttaactgatcaaggttcttccactgatttattgaaccgtccagtgtcttcttataatccatttgattccatgggtgatgattctattgtcattaatgggttatctccagatattattcacccagatgttgttcctcaaccaccagtcgaataccaaccatttggatacccattagctcatacaattaatttggtcacttgttattctgaagatgaagaaggtattcgtatcactttagattctattgccaccaccgattaccctaattctcataaattaattcttgttatttgtgatggtattattaaaggttcaggtaatgatgaaaccactcctgatattgtgttggatatgatgtcggacttgactgtgccaagagatgaagttgaagcttattcctatgttgctgttgcccaaggtagtaaacgtcataatatggccaaagtttatgctgggttttataaatataacgatgaaactgtgccaccagaaaagcaacaacgtattccgatgattactattgtcaaatgtggtacccctgaagaagccagtgcaccaaaaccaggtaatagaggtaagcgtgattcacaaatcattttaatgtcatttttacaaaaagttgttttcgatgaaagaatgactagtttagaatatgaaatgttacaaagtatttggagaatcacgggattaatggcagaattctatgagattgtattgatggtggatgctgatacaaaagttttccctgattctttaactcatatggttgctgaaatggtgaaagatccaactattatgggattatgtggagaaacaaaaatttctaacaaggcgcaaacctgggttacagcaatccaagtttttgaatattatatttcacatcatcaagccaaggcgtttgaatcgattttcggtggggttacttgtttacctggttgtttctgtatgtatagaatcaaggcaccaaaggggtccgatggatattgggtgcctattttggcaaatcctgatatcgtggaaagatattctgataatgtggttgatactttacatcgtaagaatttgttattattgggtgaagatcgttatctttcgtcattgatgttgagaactttccctacgagaaaacaagtgtttgttcctaaagctgcttgtaagactgttgtccccgataaatttaaagtgttattatcgcaacgtcgtcgttggatcaattctactgtgcacaatttgtttgaattagttttagttaaagatttgtgtggtactttctgtttttctatgcaatttgttattttcattgaattgattggtactttggtgttaccagcagccattacatttactatttatgtgattattgttgctattgtatctaaaccaactccagttatgtccttggttttattagcagttattttcgggttacctggttgtttaattgtcattactgtgtcatccttatcttatcttgtttattttgttatttatcttttcgcattaccaatttggaattttgtgttaccaagttatgcctattggaaatttgatgatttcagttggggtgaaacaagaacagttgctggtggtgataaaggagatcatagtgctgttgaaggtaaatttgattcatcaaagattgccatgaaaagatggagagaatgggaaagagaacgtagaagtactgaaaatagaaaacagcaacaacagcaacaattgacaaacaattctagtaataatttggctgttcctggtgctgcttgggatccatctaatactggaggaaatttgatgacttcaaccaacttagaaggtactttcccattaatcgctagaggtaaagttagagatatataccaagtagacgacaacactcttttgtttgttgccaccgacagaatttctgcttacgatgttattatggccaatggtatccctaataaggggaaaatcttaaccaaattatctgagttctggtttgcctttttacctattgaaaatcatttgattaaaggagatatttttgaaaaatatccacaattggaaaagtatcgtgaccaattagaaggaagatcattacttgttaggaaattgaaattaattccccttgaagttatcgtaagaggatacattacaggttcaggttggaaagaatacaccaaaagcaaaactgttcatggtattccaattggtgatgtggtagaatcacaacaaatcactccaattttcactccttccactaaagcagagcaaggagaacacgatgaaaatattaccaaagaacaagctgacaagattgttggtaaagaattatgtgatagaattgaaaaaattgctattgatctttataccaaggcaagagactatgctgctactaaaggtatcattattgccgacacaaaatttgaatttgggttggatggtgacaaaattgttcttgttgacgaagtgttgaccccagactcttcgagattttggagtgctgccaagtataaactcggacaatcacaagaatcctacgataaacaattcttaagagattggttaactgctaatggtgttgctggtaaagatggtgtagccatgccagaagatattgctgtacaaactaaacagaaatacgtagaagcctatgaaaacttgactggtgaaaaatggcaagattaa

SEQ ID NO: 6140 - DNA, 876 bp, Candida albicans
atgacttcaaccaacttagaaggtactttcccattaatcgctagaggtaaagttagagatatataccaagtagacgacaacactcttttgtttgttgccaccgacagaatttctgcttacgatgttattatggccaatggtatccctaataaggggaaaatcttaaccaaattatctgagttctggtttgcctttttacctattgaaaatcatttgattaaaggagatatttttgaaaaatatccacaattggaaaagtatcgtgaccaattagaaggaagatcattacttgttaggaaattgaaattaattccccttgaagttatcgtaagaggatacattacaggttcaggttggaaagaatacaccaaaagcaaaactgttcatggtattccaattggtgatgtggtagaatcacaacaaatcactccaattttcactccttccactaaagcagagcaaggagaacacgatgaaaatattaccaaagaacaagctgacaagattgttggtaaagaattatgtgatagaattgaaaaaattgctattgatctttataccaaggcaagagactatgctgctactaaaggtatcattattgccgacacaaaatttgaatttgggttggatggtgacaaaattgttcttgttgacgaagtgttgaccccagactcttcgagattttggagtgctgccaagtataaactcggacaatcacaagaatcctacgataaacaattcttaagagattggttaactgctaatggtgttgctggtaaagatggtgtagccatgccagaagatattgctgtacaaactaaacagaaatacgtagaagcctatgaaaacttgactggtgaaaaatggcaagattaa

SEQ ID NO: 6141 - DNA, 3774 bp, Candida albicans
atgctgtctatatatataggtgtttacaaggcattgtatgattacgctgcccaggcagaagaggaattgaatataaaacaaaatgatcttttatatttgttagaaaagtcggatattgacgattggtggaaagtgaagaaacgggtcgtcgcaactggagaagaaattgttgatgaaccatctggtttagtaccatcaacttatattgaagaagctcctgtaattaaaacagcgactgcattatatgattacgataaacaaacggaagaagaactttcatttaatgaaaatgacaaatttaatgtctttgatctcaatgatccagattggattttagttggtgacttagcaaaggagaagtttggttttgtcccatcaaactatattcaacttgattcaacagcagagccagcacagcatcaacagcaacaaccacaacaggttttccaaccaccaccacaacaacagcaggctattccacagcaacagactcagattcctatcaacaattttcctccacctcctacacataaagatagaacaccggatttccctgcaccacctgctcatagggatagatcaccagagcatccacctccaactcctgaaaaggactatcctcgtatgtttgaacaagagccaaggtctttgggttctagatacgaccgacaaccagagggtagagaagaggaagaagatgaagcacctccaccaatgccatctagaccaactgggtcaaatatcgtggcaccagaaccagttgtaggtcgttccaacacctatgaacaagaagagaatgttgaacatagtgagcattcgtatgatggagaatttttcacttggtacattgacgaggttgatggtagaaagaaaagagcaatcaaactttcaattggccaaggattagtaatcattaaaccaaacactacaaaccctaagaaattgaggatgagatcttcatcttctcttgacaaccaatggagaatcaaagacttgatcacatttaataacgagaagaaacacgtatttttagaatttaagaatcctgctgcatcattagagttacacgctggatcaaaagatgtcgctgaagcaataatggcaatcttgggtgatttgaaaggtgccgaagctgcccatggtttgagagaagtcgctaaagcatcaaaggcaagtgccaatgaaagaaacagaaaaataggtagattactttacgatttcgaggtacagggtgatgatgaattggattgtaaagaaggtgacgaagtgtatatcattgaccaaaagaaatccaaagactggtggatggtggaaaatattgcaactcgtcgtcaaggtgttgttccatcaacctatattgaaattattagtacatccaatttggataaattgacagatggtccattgagaagaaaatccacgaaatcaaagggaagagtcgttgaaacaaaagacaaacgcagttcccatcatagaaccagagaagaacgtgatagaattagagaaaaggatagagctcaaagagataaggcccctacttcacaaactgaacaagacaagtcaatgccaaatttccacagagtaagaacttggattgatagttctggtacgttcaaagttgaagcagaatttttaggatgtgttgaaggtaaaatccatttacataagacaaatggtgtcaagattgcagttgctgccgacaagttgtcagtggaagatcttgagtatgtcgaaagagttactggtacttctttggaacaatataaagaacaagtaatgaaacaacaagcaaagagagcaaaatcaaagagcaaatcaggtgctactgcgactccttcaagtaccaacgaaacaaaatatgcatcatcggcaactgcagcaattaatgacattgctccacctaaacccacaagaccacaaacaacaacacaagtatccaataatggtgccccattgtatgactggtttgactttttccttgaatgtggagtcgacattggtaattgtcaacgttacactctcaattttgagcgtgaacaaatggatgaaaatattttggaagacatttcaccatccttgttgagaactttagggttaagagaaggagacattatacgagtcatgaaatatttggatgcaaagtttgatcgtaagaaaacaccagaagcaccacaacagaatggtggtttgtttattgataagaatggtaatttgaaaaacaacagctcttcaactgaaatatccaaggtctcagccgatgccttgccatctccagttaagactcaggtcacttcttttacccctgttaatgaatctactcaaaataataacaagattgaagatgacgcatgggcaatgaaaccagctgcaagatcaagtgaagatcttctcaaaccttctcctcaaccacaaactcctcaatacacaggagctttgtccgatcttgttaacatcaaacctgttggaactagcaatgaaaacaaggctaaaacagagcaaataccagttgaaccatcagcaccagcacttcaaccaatgaagacttcaaatactgctgccacctcttctattcctcctcagggccctggtgtaactccacaaagaacaggaactttggttcccgtccagaagacaggcggtttagtgcctgttcaaagaactggtgctggattagtgccagtgcaaacaggtggttatttgcctgctcaacctacagggtttgttccaatcactgctcaacctactggttttattccaattcaagctacaggaattttgcagccacaattaacatttggtattgttcccttgcaaacaggtacaagtactttcaatgcaaataacaagactgcaccaccaagaccagacacggcacctcctccaattaccacatttggacagcaacccacgttccagcctgcgtttgttccattacaaacaggtgtaattaccatgcctcaaaccacttttggtggccaatcccaacagttgccaactcaaataactggtggtgcaccaccgcaaacatcctttaaccaaccagcattagttccaacacaaagaacaggcggtcaaattactggtggatttgtaccacaatccaattttggtaagcaaattactggtggatttatggacactaatacgttgtcatttggacaacaaatcactggaaatgcacaacaacaaccgccaccatcgacttcatttggacaacaaataactggagggttgccagcaacttcttttggacagcaaattactggaggtttcccacaaacgtcatttggccagcaaatgactggtggagcaccacagacttcttttgggcagcacataactggtggtaatatgccaaatacctcatttggccagccattttctcaacaagctacatctaacccatttcctcaaatggctaatcaatttacacagcagcaacaatatcaacaacaacaaccagtaatgaaccaatttcaacaacaaccgcagcaacagcaacaaccattttacaatcaatttcaactgcaacctaatcttaatcaaatgacaaatatgtttcagaatacttctatatcttctcctgctacgttcaatcaacaaattccaaccacaacttttggccaacaacctcaatttgaaggatttggatcacaaccattacagtcacaaccaactggtatgggctttggaaatgcaccattgcaatcacaacctacggggaagagagctaatctacaagcagcaacaccagataatccctttggattctag

SEQ ID NO: 6142 - DNA, 2313 bp, Candida albicans
atggcaccatcatcatcatcatcgttggatttgcattatgaacggcccaaatggtatcgtttagcaatttatgatactttattatggctattatcagttatctttgattgttttttccgagaaattcgaccaagaggagcatttaaaattcctcgtgaaggtccagtcatctttgtggcagctcctcatcataatcaattcgttgatcctgtacttttaatgaatcaaatcaaaaaagaggccaatagaagaatttcgtttttaattgctgccaagtcttataagttaaaagcagtggggacaatggccaaatgtcaattgtcaattcctgttgtgagaccacaagattgtttagttaaaggaacggggaaaatttttgttgatttcgataaggatccattgagagtcactggtaaagacacaaaattcaccaaagaatgtatggtcaaaggtttaattgcattaccacagtcattgggtgcttctgaaattgtggaaataatctccgataccgaattagtcattcgtaaagaattcaaatctctggataaagttaaagttttattaaccaacggtactgcttataaacgagcagacaaaattgaccaaaaacaggtttatcaaatggtatttgatcatttgttagatgatggatgtattggtattttcccagaaggtggttctcatgatcgtcctgatttattgccattaaaggctggtgttgccgtaatggcacttggtgccatggataaaaatcctggttgtaacattaaaattgtcccttgtggtatgaattatttcaatgcccacaagtttagatctagagcagttgtggaatttggtgatccaattgagatccctaaagaattggtgaaaaaatacgccaacccagaaactaaccgtgaagctgttaaagaattattagatacaatcaccactgggttgaaagctgttactgttacttgtgaagattatgaaactttgatgttaattcatgccgttagaagattatacgctgggaactttgctcaacaattacccttgccattaattgtggaaatgaatagaagattggtaattggatatcaacatttcaaaaatgtccctaaagttcaagaaatcaaagaaaaagtattacattataatgattttcttaaaactttgtatttaccagatcatgacgttgaaagttgcaacgacgaagctcataaaattacattgatcccaatatttttctttagagtttttaaattattaattttattcattttagcattaccaggggctactttattctcacccgtgtttttgtctaccaaaataatctcgaaaaagaaagccaaagaggcattagcaaactcagttgtcaagatccaggctaacgatgttgttgccacttggaagattctagtttcaatgggtattgcccccatagtttattctttttacgccagtgttggtacttattactgttcaactcatgactattttctgcattggaaattattttgggtatggatttttttgtatagttgtggtgtattggtcacctattctgcattaattactggtgaacaaggtatggatttgttcaaatcaatccgtccattatacttatcaattacatctggttcgtctataaaagaattgaaaaaaatgagacacgaattgagtgaggaaattactgagttagtcaatcactatggtccacaattattccctaatgatttcaatttgttagatttgcaaaaatcattgaacataaatggtgatgttgtttacgctgacagtgacgaagaagaagatatgaaaactgaagagttacgtaaccgaagaatagctagacgtaaagctgaaaagaaaaagaaacagactcaagaaaatgaagatacccaagaacttcaaagttctgatatgaaacactcttcatctatgagtgatggtatttccttgttgaattccgataattcattaactaatttaccaatgttttccgattatgtcttgcacaaaaatgccaagaatcctgatctacaattggatccacaatcccattatggttcaagagtgaattcgaatctcaattctggtgccaattcttcagtttctatttatgatgattatcgatttgcatcacaatcagaacatggcggtactgcatcacctgtaagatattcaagactccctcatttacctgaaacatcatcttcagatcatatggaattgaattttgcttcaaaacctgaaggacagaaaatgcgtttgagagatagaattaaaaccaaacttcgggaaaatagaaaagaaaattaa

SEQ ID NO: 6143 - DNA, 672 bp, Candida albicans
atgttcagatcattagtcagaaaaacaacacccttgcttgcatttggggtaggaatagcagcgtttcccaaagattggagaaaaggtcaatttggagataaaaagttgttggtgatcaatgattcagttctagagcaaattaggtccactgataggtataaacagttggtcaacgaccctaatctcaaacattacaattccagccacgctttcccagatcaacatcataaaaattacgtgaataccgggcttttgtttggacccgatttaatggaaatagatccaatagtatttcttgatgaaaagaatggggagttgaccagtttttatcacttgggggataagctcattagtcaagatggtcaaattcataatgggattgtctccacaattttggatgaaggattgtgttctgccggattcccattattaccttcgaagaagggggtcactgccagtctactgattgatttcaaaaaccaagcaccgccacaaagtactgtagtgctacatgcaaaggtcaaggaggcaaagggtagaaaagtcgttattgaaggctacttggaaactttgccattgaataaatctgaaacaccattgttgattgctgagtccaaatgtgtgcttgttgaaccaaaatggttcaaatactttgcttggttgcaagtctag

SEQ ID NO: 6144 - DNA, 1983 bp, Candida albicans
atgtttcaacaacttacttataggctacgattgtttcgtcgtcgtcacaagtatatcttcattaattccatattcttactggtcattataatatttcttatatattcatattggagtaatcttcccgctgaagataattcagcaattatcaatgaaaaaggtacatatcatcgttcattatgggaatcgataactatggcgttgtttccaccgaaaaccaaaccttttgaagaaaagaaacctcaagttaatccaaacaacaatcaagaagtcggcgttgaatcaggtgcatctgaaatttcacaacacaaacagcaacaacaacaacagcagcatgcaaaagagcctacaacgaaaacactgctgaaatcgttagtgtcggatgaggcctatcaattgaatttaaagctaatcaatgaacaacaagaaaaatacaatagattacacccgtttgaacaaaaaagactacaacaaggatacgaatttttcgacaatatttttaaaatattttatcaagccaaacccagtgtgtcacaattaaacacttatccttctaagaaaagaatatatcatgctcgatttgattcattagccgatgacgatactatattcagtgagaaatatttatcccagtttttacaattgagtaacgaagaattggccgccatgaaaaaatctcacaaatacgttgttgagaatttaccggaagatgcccccgatggattatacaagaagaatgggatagtttacgttgctggtggaagtttcaattggcttacattattatcaataaagtcattacgtgcagttggatgtcatttgcctattgaagtattcattcctaaaatagaagagtatgaatctgatttgtgtaatagaatattaccggaattagacgcccgttgtatatatatgaaaaatcaattaatgaaccccaacaaagataatctggatagctttgctaacaagtttgaattcaaaggttatcaatataaagcattggcgatattattatccagttttgagaatgtgttgttgcttgatagtgataatatccctgcacattcaccagaagagctatttgaaaatgacccatttaaatcttatgggttggtggtctggccagactattggaaacgtgccacatctccatattactacaacattgctgacattgatgtcagcgaaaaatatttgggtagtaagtacaatgaagtggaaggacaatacactgatttatcagttgagaaaggatcagttgaattagataaaataccattacatcaacggttaggaagcatacctgatcctactagtgaatcaggtcaattattgatttcgaaaaagactcatttgaagccattattattagctttatattacaatttatatgggccatcacattattatccattattttcacaaggatcagatggtgaaggtgacaaagagacatttttggctgctacagtcacgttaggcaaaaggtattaccaagttgccaaatttttggtgtctttaggccatttcaaagtgcctggtggtgatttcgaaggatgtggaatgggacaatttgatcctcaacaggatttggaatatatcaagttacgagaacaatatgccaaaataccagaaaaggataaagaaaaacaacataaattcaaattacaacatcaagttttggaaaaggggccagagattttatttgtccatgctaatttccctaaattgaatccatggaagttaaaacaagagaagaaaatatttgatgctaaaggcaatagagttagattatatggaccaggtatgataaaaagaattgggtatgattttgaatggtttcaatgggaaggaatgaaatatttactatgtatttatgatgttaacctacaaatttttcaggatgttaaaaaatcagatttatgtgatgagattttggagcatttaagatttttggaaagtacacagaatataactgattaa

SEQ ID NO: 6145 - DNA, 2094 bp, Candida albicans
atgagtcacagtccaaatttatcacctcaaatcagtaatgacattatagatgctgatactacatctttagcttcaacagaaactcaacaaaatattcaacatagtcaaatacatcctataggtcatcatggacgagagcaactggaagagccacagaataccaccaaaacaaccaccaccaccaccaacaaaatccacacaaccacacctctggtagaccctgatttgggaccattaagggaattagaacaagatctatcatcattagaatcacaacaagaacaatatctaagtcaaaaacctacatctacatcaattaaaaccaataaagtcccattaagagaacgaagaggtttacttgcacaaattgttttgattccagaatatgaagatgccagagattatcccaataaaataaaatatctaattgttttcataattgcttttgcatcattagcaggaccatttggaacttcagtaatgttacctgccattgatgatattgttaatgatttaaatactaatgtatcgacagtgaatgtatccgttggtatttatttattatcattaggtatatttcctctttggtggtcatcatttagtgaacgatttggtcgaagaagtgtttatatggtatcatttactttatttgtggcgttttctattggtacggcattatctcccaatattgctgctttgattgtattaagagtgcttcaaggtggttcatctgctagtgttcaagctgttggagcaggtactattgctgatttatttattcctcaagaacgtggacaagctatgggattatattatttgggccctttggcaggaccgtttttggccccaattttgggtggagctgtatctcaagcttgggggtggagagctactcaatggttattaatgataatttctgcttgtagttttgttctaattacatttttcctaccagaaacattaagaagagttgatactatacaagttgctaaagatttgatgaaaaaactggacaataatggtctgcaaaatgaaaaaattcatgatgattttgccggtgcggacaattctagcgtacacgatatagatggaaaccccattcctggtactgaattacatcaagtggtttcaaatttgagtagaagatcatcaaatgctcgttctattgtaacttatatggaagaacaagaaaatgaaggtccaataattgatccagtgatgcctagtatatctcggttaacaacaaatagatcagcttattctcaaagaatacatcaaaattacgtaactgatgaattaaggaaaacaacatctaatttaactcaatccaaccatccacaatataataataacaacaacaacgacaatgataaatggtcatcagtgaaaaccaattgttatgatttaataatccgtccattacattcaataatattattaacacatccacctgttgtccttgtcatttcattttcagccatttcctttgctgcaatttattttttcaacatggcgatttcttatgaatacgcacgttcaccatataatttctcatcagtgattcttggattaatgtatatccccaattccgtgacatatttcatggcttctataattggaggtaaatggaatgatcgattattaaatcgatatgctcaaaaacatggagaattggttcctgaaagtagattatcttggaatatcgtcgtggcaataattttatatcccatggcttgtttgatttttggttggacaattaaatatcgtgaattttgggtcataccattaatcggtaccgcattatttggatttgcttctatgcttgttataggtgctaccgtgacttatttggtcgattcattacctgggaaaggtgctactggtgtggcgttgaataatttaattagacaaattttggcggctattgcgacttttatagttgaaccgttattaagagcgattggagcaggtgttttatttagtattattgctgggatattattggtttcttcattggttttgttatatttgaagaaacgaggagcttttttcagagaacattatgatgtcatggatttatatgccaagttgtaa

SEQ ID NO: 6146 - DNA, 912 bp, Candida albicans
atgagtacagatatattttcaatatgcgctaaatgcttgggcgatgagtcacgaatcaagatgatcaaacaggtcaatggagatgagtgtcgccagtgtacccggccgtatacaatttatcgatgggggaatagaaaacaaggaaacaaaaccataatatgcatcacatgtgctagagccagacactgctgtcaatcctgcttgctagacattacttatggcattcctacagacctaagagatactgctttggagatggctggtcttgaaccattaacaaaatctgccaacccgacaaaccgtgaagtgaaagccattatggccgataaattggagactaaattcaaagagcaacaagaaagatccaatgatatattgtcgaaactagctgagaaactaaataagcccgaggagaagaaaacagaggttgctatagatgtggccaagctagcaaagaaacttccgtttgggaatctgcttgatgttcagaagtatccggatatgacaacgttttttgtatttgggtttctgtcggatttcccgcaggccattttttcgagatatgcggaacagtatgggaaagtagagtcggttgtttttagcagtgtaagtgggtgtgggtttatacggtttgaaaaggtgagttcagcagtggggtttgccaagtcgatcgctgaaaatggattgaataaaaataaaagtattgctggactattaattttagagaacacgccgatgagagtttgttttgggaaacaaaagccattaccccgaactgcagcagaccaaagaaagttgaatactgtagtcacaaaagtgatgaaacagttggcaagtaagagcaaggttggggtggtggtgaaaactaaacctaacgtatataaagctttactggaagactatgaagagtag

SEQ ID NO: 6147 - DNA, 1242 bp, Candida albicans
atgcaaattaagtcatttcttttaccaatagtcgctgccttattgacatcagtttcagcagcagactcatcaaacaaatgttcattctctaaaacttccatcacagaagctactgccattacccaattaaatgcatgctctactttggatggtgaaatctccatcagtggtagcggaatcggtagcattgatttgagttccgttaaagtattaaaagccaaattgagtattctcaactccccatcgattgtctcattaaatttcaatcaattacaaaacattactggtgctttagtcattaataatgctacccaattaaactcaattgatttaacccaattaaccaacgttgaaacattacagttggtctcattaccttcctttgcgattttaaatttgaatcaaggggtgcaaaaggcaggaacaattgttttgagtgatactgcattgactaatttgaacgggttggctagtttcaacaccattgattccattaatatcaataacaataaaaacatttccaaaattgaattcagtgatttacaaacagtcaccgatagtttaatcttatcattcaataacgatgatgccgaagttaaattggactcattgaaatgggccggtaatttaactattcaagatgttagctctattcaagctagtaacttgactagtgtcaacggatctttattgatcagttacaacacttttgacgaattggaatttccaaacttgaaatccgttggtaactctatgcaaatttttgctcacgatgaattaactaaaatttcattcccaaaattatctgaactcgatggtgaattggaaatgttcaataatactcaattggaagaaatcgattttggcaatttgaccactatcaaaggtgctgtcaccatttctggtccatttgataatttgactatggaaaatttgaaattggtatctggtgatttccaagtcaatagtacttctgataaatttgattgtagtgcttttgataaattacacgaaaaaggtaagattgaaggtcacaattatgtttgtactcatccagctaatccttcttcatcctccaaatcaggatcaagcacacaaactggtaaatcagatagtaaatcttcagatggttcatcaagctcaaattctagtagctcatctaaaaaaggtgctagtaatgtattggttgttcctggtatggtattgactacagccttgggtgttttattggcattaatttag

SEQ ID NO: 6148 - DNA, 3924 bp, Candida albicans
atggacaaacttgaaactttccaacgtaatgatcctagaaagttatttgaattggctaaccagttgaatgaacgactgttctttgcaatctttctaaatgaaactcaattcaagataattaatcatattttatccttagataatttcgagatttggacaaattttttggaaggtaattgttatatttcctatttgcaacccgaagataagaatgacaaacctgagactccaaacaccaatgagaacaacgagagtgctggtggtgagagaattcagaacaatagtagtgatagagataccccaactctcaataacaatgataaaaagaatgattcaaacaaggaaaccatgcaagcggaattggagaccccagaaacattattcccagagggggcagaaatgattaagaaattggcactacatgtacgatacctcttgtgggagaaagcgattgatttttattataattctaaggtgttggatgagtcaaataacatattagatgaagtttccgatgattaccagttgattgactcgttggacaatattgttgacgagaaagcatctaacgaactggagaaaaaggaagctgttgagaaactaaaagtgagagaaatcgaggatgattatgatgatgatgacgaggacgaagatgaagatgaagacaataatgataaaccgaacacgactgatttagcaaataataattcaaattcttcagagagtaggttggcatataattcaaatgaacagcttgtgctagagatcccgttatccatatttaaaactaaacaacaagaaacaaatggcacacaagaccgaatatccaatctgttactggcagatggtaactcgtcgtcaaacaattttggggtgataaaacaattagaagaaaacaacaatgaagatcaagataaacttcttcaagagtttaacaaagtgtatcacaattttgaatatgatagagagactttactaaagaggaggaaattagaaaaatctgatatgcaattggaatccaacaaatcgaataaaggagataacgcgtctgattcgaaatctgccactcacatagatatgaatttgggagcagcatctacatctttacagcatttactttcgacaattcaactgaagagaaacaaagttcctttgaatgatcatgaattacgaacattatttatggatgttcgtaaaaatagagggaaatgggccaacgatgatagagttggacaagaagagttatatgaagcctgtgaaaaagtggtgactgaactaagaggctatactgaacattctacttttttcttaaataaagtttcgaaaagagaagctccaaattatgggttgattatcaaaaaacccatggatttaaacaccgtgttgaagaaattgaaaaacttggcatataattcaaaacaggaatttgttgatgatttgatgttgatttggagcaattgtcttacctataatgccgacccagcacatttcattcgagcgcatgccatagctatgcaaaagaaaactattaaattgataccaactatccctgatatcagaataagaaatagagctgaagttgagaaggaagaagaagttgaaaatggtaaacgagatgaggaagaggattcattaggtggtaaatcaatgaaaaagggaagaaaaagatcgagacaagatgaaatcaaggcagaagcagaagcagagacaccgaattcaccgtcacctgcaggaaccccttttttggccagtgaagtgaattcagtacgagaaaacacaccagcggccacagataatgggaatgtgtcaaatgatgaagaggaagaagaagaagaggatactgataatatcaatgggacagctactggtatcagcggtatggtagatggagatgacgaagaatttgaccctgaattacaagcatggaggacattaacagctaaatcgagagctaattactgtgcgcaaagagcagatttatttgatgaaaatggacatcttaaaagtgatgtccccgctatttgccggaaatccaatgaaatgtcaaatttcaacgaatatttaaataataaagaagtgatatcgaaatcgaaaagtttattagaaaatgatgaaccatatttacttgaatatgatgttgctggtgggattccaggtattgcatattgtggtgtcgacaaagaaactgaggaaacttatgaaaacaaattagttgacatttatttacaacaaactagtggtgatgcttccaaaattaaatcagattttgttttatcaacaaactcagggttgaataaagtctattttgagaatatttgtgagatacaagaaattagaaaaatctgttttaaaatttcacttattcgtcaaatgcaaacacagcaatttgtacatcatacacagatgaaacaaccagagattcaaacattgaaggaaattgatgttgatgctgcctccaaattgcctaaccatgacgctagtactggcgatgttcagttttcggtgtttcgaagaaatattgccaaaattgcgatgcaaactggatttgaaaccactcaacaggcagcaattaatactttgactcaagtagcagagagatatcttggcaatttaattaaatcgttaaagttgcacagtgaaacgacatcggataaccgattacctccacgagaaatcttgttattatcattactagagaatggtgtagatagaccagatgatttgtatacatttgtgcaagaaagagtggtgaagcaacagggaaaacttaaagatttacgaattaaattatccaattttttgaaagatttgcttcgaccgggattagaaaactttaatgaaaaaagttttgaagacaatagtgaacaatttatgacgggtgatttttcaaatggaatcggtgatgatttctttggattcaaagaattgggattggacaaagaattcaaaatgttaacatcatccatccccatttatttattgcattcacgtttacataatcaatttactactggtggtggtactgctcaaagaaacaagtatgaagatttacaagaatatgaacccgacaaaatccatggtaatgaagttgataaacaaattggtatattgatatctttttatcagacattgtatgaaaaatctcagacattttacgttaaggcccagaaaaagaagggtgaatcaatggaattacctcctgataatattttcatattgacagaagatgaagatttaccacaaaagcaaagaaatgtaagaccaaaactaccaccaactggtagaatttcttctattaaaaagaaaatcattgctaattcgtttttcttgcctgaagaggaagagttacaaaaacaggagatggaattgaaggcaaaagaagaagccgaagctgctgctgctgctgctgctgctgctgcgaactcaacacaaacagctgaaacagcacaagtgatgaaaccagtagattcattggaaatgtcagagactctaaatacatcggatatagcagatatgctacgagaaatagagtcagcaaatgcgccagtctctagagaagaacaactacccgaaaaacaatttaatactgaggagaagaaagtaggtttaccaaagacagatgcaaatgaacttaaatatgaaccagtggatgagcaaagtaagatatatgccactactgaaaaaaatgataatgttaaaggaattgaaaataaaccaaaacaagaggattttaaacaaattgaaaacaatcaagagaataagaatcttgaagaaattgaagatacacttgaagatgatacagagattgaaaacagtgactcgaccaaactagatataaaggagaatgaaactcttgtttatgaatcagaagttgatccagatgaaagttccattgattctttgtttgaacaaaatgaagaataa

SEQ ID NO: 6149 - DNA, 987 bp, Candida albicans
atggctaaaaagaaatcacgatcaggtttacttaaagcacctaagacaattacaggaaaacatggtgttcctaaaagtctaaagccacaaagggcgagagaaattatacgtagatttcatgtgctacaaaagagtaaagactctgttctagccaaacttcagaagattattccacaaatttccaaaaatgactaccatcagattgaagaaatgtctatttaccaagattcctttaaagggtttgttttgcctttgaaatattcggagaatccaatctacaaaatagaccatacccttaataagaatgatctcatcacaacattggcatgcatagatgctgaaattaaacagcggggaggcattgaagcttaccaatctgcatcaactcaaggtcaagcaagtaagagaggtggagactcttctaaaaagttggtagaatggttgaaactggacttgtacaaactgaaacttcaaaatgtaaatgccttggaaattggctgtcttagtccttataatgcaatatccacaagttcaatatttgatgatgttgttcgcattgatttgaattcccaaaactcattgatacttgaacaaaattttatggatcggccacttcctcagaaggaatcggaaaagtttaatctaatttcctgttctttggttataaactttgttccttcaccaaaagaaagaggagagatgttgcttcgaataaccaaatttttgaagaagcctaaacacgcaatgagtgccttgtttttggtattgccgttaccttgtgtttctaattcccgatattttgataacgagaagctaatagaaataatgactgcgttgggatttactcagactttttcttatgaaggaaataaggtggtatattggctattcgattggaatgggaaggtgaatttaaagaagaaaattccaaagaaagagttacactcgggatccaatagaaataacttttgcattacgctagcatga

SEQ ID NO: 6150 - DNA, 927 bp, Candida albicans
atgaatattgttaaaaatttatttaagggaactactacaaataatcttgataaagaaattcaacaaaaaggatttgaaatcagtcaatgttcagaaatttgtgaatcatgtactagtaaattccctaaacatttaaaatttgaaggtgaaagtgaaggtacatcactttggaatactactaaaccttatggaatgcatattattatagctacgggtaaaaaagattggtctcatgatgccattaatgaagatggtaaaaaaaaggatactttaaaatataaaattggtaaatgggctgaaaataatacaaattcaccattggggactataaaagttaatgtatcatcaatgagttcagatgaattatatattaatgaaaattataaattagaaaaacaaggtgatttattaattctaccttattttttaaatatcaaggggatcactattgatgaagttgatacctatttaaatgaattagaatcattattaatcaattctactaataataatgattctactattattattgatgaaatcattaccaaattacctaaaatatcaccaaatttaaatcaaagttttgtatttttttgttctcatacaacaagagataaacgatgtggtataactgctccaataatgaaacgagaaattgataattatttacaagaattggatttaataagaaattttggtgattatcgaccaaatggaattcaaacagaatttattaatcatataggtggtcataaatatgctgctaatgtgattatttatttaaaaaaactggggaaaaatatttggttaggtctttgtaaaccaaataatattaaaccaattgttgatgaatgtattcttggtgatgggaaagtttggcctaataaagttagattattacaaaaatttgatcccatagaatggtag

SEQ ID NO: 6151 - DNA, 1140 bp, Candida albicans
atgtcatcattatcatcagtcaccaggagtgctaaattagccactcaatctttgaaatacaacactagaccatcattatctaaaattggtcaatttcaaacatcaaaaatcacttatcgtgccaattccacacaatcaactcctgtcaaagaaattactgtcagagatgctcttaaccaagctttatctgaagaattagacagagatgaagatgttttccttatgggtgaagaagttgcccaatacaatggtgcctataaagtcagtagaggattattggacaaatttggtgaaaagagagttattgacactgcaattactgaaatggggttcactggattagctgttggtgctgctttacatggtcttaaaccagttttggaatttatgacttggaattttgctatgcaaggtattgatcatattttaaattctgctgctaaaactctttatatgtctggtggtaaacaaccatgtaatataactttccgtggtcctaatggtgctgctgctggtgttgctgctcaacattctcagtgttatgctgcttggtatggttcaattcctggtttaaaagttttatctccttattctgctgaagattataagggtttacttaaagctgccattagagatcctaacccagttgttttcttggaaaatgaaattgcttatggtgaaacttttaaagtttctgaagaattttcatctccagatttcattttaccaattggtaaagccaaaattgaaaaagaaggtactgatttaaccattgttggtcatagtcgtgcccttaaatttgccgttgaagccgctgaaattttggaaaaagatttcggaattaaagctgaagtgctcaatttaagatcaattaaaccattggatgttccagctattgttgattcagttaaaaagactaatcatttggttactgttgaaaatggattcccaggttttggtgttggttcagaaatttgtgctcaaattatggaaagtgaagcctttgattatttggatgctccagttgaaagagttactggttgtgaagttccaactccatatgctaaagaattggaagattttgctttcccagacactgaagttatcttgagagcttgtaaaaaagtattaagtttgtaa

SEQ ID NO: 6152 - DNA, 1017 bp, Candida albicans
atgtcgaaacagaacatagacaagagtactgaacacctggcaggggaaaatgcattatctgaaaagaatcatactatagaaagcaataaaaataatattgatagtgaagaggatgacgaagaggacgaggattatgatcccgaaaagaaaaacgaagccgaaaatgaaggtggcgtctccagcgatgaggaagaagacaatgatcaatataaagatggaaaaacatccaaaatacccgactattctacaattgagtcaagtacatcacaagttaaaactagatctcaaagacttcatgaaaaactactgaatcagtctagatttattggaaattttgaagttgattcgaaaacaggacttgtcaaggatcagtcgaatatcgatgttaattcaatatttgaaaatttgaaaaatgggagtcctagtatagacaatctggaagaactaaatattgacagtgaaaaaaccgcaaatagtcaacagcaacagaaacagcagtcgaacatagaggaaaatgaactacagggcccgaaacaaatcaaaattcaaatcaattatacatttgctggaaagctaataacagagacaaaatatgttgatgaaaactcacaagaagccaaggcgtatttaaactcgacaagtaacatttcttctaacaattcgaacgaggatatcccatatagacgatctcaagtcaaggttattaggactgaccccgtaactaatgaaacgaaggagctacgtatcaaacttaaacgaccatctttgattgataggtttttatctataaatggtaatagcaaaaaaatgaagttgtctactctagaaaaatcacggttagattgggccagttttgttgataagaggaatattaatgaggaattgaaaatacataataaggctggttacttggataaacaggattttataaacagaatgaattccaagcgggacgatttatacttgcaagctaaagagaaagaaaaaatacgaaaacaacaattattacagaagtga

SEQ ID NO: 6153 - DNA, 1884 bp, Candida albicans
atgacgaaaacaatccatatcatcgatgtagaaagtggtaatttacaatcactttcaaatgcaatcaaacgtatcgattctaattatatcattaaattcattcataatgaacaagatttcattgataatgattctcaaattgaaaaattgattttccctggtgttggtaattttggacattttgttaaacaattaaatgaacggaaattaattaatcatttaaaatcatatattaaacaagatcgtccattaatggggatttgtgttggtttacaatcgatttttcatgaatcggaagaaagtccaaatattaaaggattaggattattattagataatgatgataatgatgatgatgatgagaagaagttaaaattatataaatttgataatgatgatgaaaaatttaaaatcaggggcattaaaaaatctgttcctcatattggttggaataatattcatgatataattattaatggcaaacaaacaacgactaaatctttatatggattgaataagattgataaatattattttgttcattcttatgctgcaattattaaaaataataatgatgaaataattgaaaataaattcattaaggatttatcttcaaaaggttgggatttggcaattagtcaatatggatcagaaaaatttatatctgctatatcaaaaaataatttatttgctactcaatttcatccagaaaaatccggaattgttggtttaaaaattattaaaaattttttaaatggtgaaaagaacccaaccccaaccccaaccccaaccccaactccaaacaacctagcccaaggggtagattcttcttctactttggatgttgaaaccaccttaacggggttaactagaagaattattgcatgtcttgatgttagaactaatgatgatggtgatttagtggtcactaaaggtgatcaatataatgttcgagaacaattatcatcatcatcaactaacgaatctgccgaggaggattcttcacaggttcgtaatttaggtaaaccagttgaattagcaacaaaatattataatcaaggagctgatgaaattacatttttaaatatcacatctttccgtaattctcctttaaaagatttacccatgttacaagtattgaaaaaagctgctgaaactatatttgttccattgactgttggtggaggtattaaagatttatatgatccagaaactgggaaaactgttcctgctgttgatgtggctcatttatatttccaatcaggtgctgataaaattagtattggatctgatgccgttaccattgccgaaaattattatgccaataatggggaaattaccggtctttcatcaattgaaaccatttcttccaaatttggtaatcaagcagttgttatatcagttgatcctaaaagaaaatatatcaaagatccaacaactgaaactactactatgcaaacaataaaaatcactgatccttcacaatatggtccaaatggtgaacaatattgttattatcaagtaacttctcaaggtggaaggaaaattcatgaattaggtgcattagaattatgtttagcttgtgaaaaattgggagctggagaaattttattaaattcaatcgatcatgatggttccaataaaggatttaatttacaattattacaacaaattaaatctcaagtttcaatccccgtgattgctagtagtggtgctggtaatcctcaacatttccaacaagtatttgaaatggattgtggaattgatgctgctttaggtgctggtttgtttcatcgtggtgaatataccgttaatcaagtaaagaaatatttacaacaagaagcaaaaatggatgttagattagatgaagatttggagttgtaa

SEQ ID NO: 6154 - DNA, 909 bp, Candida albicans
atgttaaggagaactccctgtgtgattagacaagtcatcagaactagtattagaaatagtagtaattctggttcgacttcagcattagcatataaaactttacatcgtaatcaaaaacgaccaccattgccaacattagaaaccccaaattggtcagctgatactgctgtttcatcgattttatatgaaaccccagtaccttctaaagctccaccaaagcaacatgttttaaattgtttagttcaaaatgaacctggggtattatcaggagtttccggtacattggctgctcgtggattcaatattgattcattagttgtttgtaatactgaagttaaagatttatcaagaatgacaattgttttaaaaggccaagatggagttgttgaacaagctcgtagacaaattgaagatttagtacctgtttatgctgttttggattatactaatgccgaaattattaaacgagaattattattagctagagtatcattattaggaccagaatatttccaagaattaattgctactcatcaattacatattgatgatggttcatcaattcctgacattgatgcatgtgaatcagcttatcatcccaataatttagctccaagtgaagctttaagacaaaaacatattcatttggatcatatttctactttaacaaaacaatttggtgggaaaattgttgatatttccgatagaaatgtcgttgttgaattaagtgctaaaccttcaagagttagttcttttattactttattacatccatttggaattttggaattggcaagatcaggtatgatggcattgccaagaactccattgaatagttttactgaagtggaagaagagtctattgatgctgctgatattgttgatgcatctcaattacctccaggttag

SEQ ID NO: 6155 - DNA, 2517 bp, Candida albicans
atgatattccctattttgcctgttatatcttctccagaagataagcaatctattgacgagttttccttagttggtcaagtacttttcccaattgaaagtgttagtcccaagaaacattttattcatcaatttcctcatgacttggatatttttgtaaatgctattgataatgccaccaccgaccaaattgtcgagttgttgaatgtgggaattaagcaggtgtttgttaatgagaagcaataccatgacgccattgaagctggtttaccaagctctaggtttgttgtagcagtcgatgttccaagtactgaattattgacatctgaagcatcctttgttacttctaaaccattttccgaaagtgatttaaagaaatataatgccaatgaaaaccgagttatatacattgagtctaactttactcaggatggagccattgaattggctaaaaactacgttccagtgattccaagcacaaaattgactgtcaaacgtgaagaagagaacaagatatcaatttctgcagtgtttgttagtactttgactaccgacagaccagatgggttgtacactacattaatcacaaccccttcaccttcctatacagctttgggtatagtatattcgtccaaggactcgataattgctgcaattgaagaaaaagttggggtttaccaatcacgtaaacgcagagacgaattgtggtacaagggcaagaccagtggtgcaacacaaaagttggtaaagttatccaaggattgtgactctcatgtgattcagtttatggtggagccacgaactgggtatgggttctgtcaccgtgaaaccaaattcacatgttttggtgacgatattgccgactctccagttagaggattgccgaaattagatagtactttgcaagacagattggaaaatgcacttgaagggtcctacactaaacgtttatttgatgacgagaaactattgattgccaagttgaaggaagagttggatgaattgattgaggctaaatcaaaggaagaaattgcctgggagtgtgctgatttggtttattttgccatggtttggtgtatcaaacacggggtgagattggctgatattgagaagaatttggatgtaaagtccttgaaggtttcaagaagaaaaggcgatgccaagccccaataccaagaagctcctgtaaatagcagttacaagctagagattgttagtgttgacgatgctgctgctgttgagcgtgcaatgacaagacctgtacaaaagactgcagacattatgaaactcgtgcttcctattattgaaaaagtcaagtctgatggagacaaagcacttattgagttgacttccaagtttgatggtgtaaaacttgatgctcctgttttacaagctccgttcccggctgatttgatggatatttcagaagaaatgaaggctgccattgacttgtccatgcaaaatatcgaaaagttccatgctgcacaattaccaaaagaaaaagttatgacagtagaaaccagtcccggcgtatattgttctagatttgctaagccgattgagaatgttgggttgtatgttccaggcggaacagcagtgttgccctctacagcaatgatgttgggtgtgcctgcaaaagttgctgggtgtaagaacattattgttgcatctcctccatcacgtgctacagggaagttgacgccagaagttgtttatgttgcgcacaaattgggagctaaatgtattgttatggcaggtggtgcgcaagcagttacggcaatggcgtatggtactgaaagtgtactcaagtgcgacaagattttgggtccaggcaatcaatttgttactgctgccaagatgtatgttcaaaatgacacccaagcattgtgctctattgatatgcctgctggtccgtctgaagttttggtgattgctgactctaacgccgatgctgattttgttgctagtgatttgctttcacaagctgaacatggtgttgattctcaggtcattcttattggggttggtttgagcgatgaaaagttgaatgagttccaagctgcagtggagagacaagctaaagtgttgccaagaaaggatattgttgctaaatgcttggctcattcgtatattttattggctaaaacctacaaggaagcatttgatttgtcaaaccagtatgcacctgaacatttgattttacaaatcgatgatgcaccatcgtatgttcctgatctgattgagaatgccggttcagtatttgttggtgcattgtctcctgaatcgtgtggtgattactcaagtgggacgaaccatactttgccaacttatggttatgccagacaatattctggagtcaatactgctactttccagaagtttattacttcccaagaggttactgaaaaaggtcttcagaatatcggtaaagcagtcatggagttggcaagagttgaagggttagaagctcatagaagagcagtagagattagaatggagagaatggctgaaaccaaataa

SEQ ID NO: 6156 - DNA, 882 bp, Candida albicans
atgtggaaaaagaaaaagagggaattttttttttgtcattcatttttttttttcttttatctcgcacatttctttcttcaactagacatgtcttggggaggatttaagaaagcaatcaatcgagctggcgcatctgttattgtcaaggatgttgacaagactatggataaggactttgatgtggaggagagaaggtacaagaccttaaagactgcagggacgaatttacagaaagctgccaaggggtatttggacaacatcagagcaatcacgaattcccaagtcacaattgccgagattatttataacttgtacgaggagtcgaagcagggacaatcgctctactcgaatgttgggacttattacatgcagagtgtcaaggagtttgatgaggagactgtgaaacagattgatggcccgtatagggagactgttttggatccaattggaaagttttccaactactttagtgagattgacgaagcaatcaaaaagagagcacacaagaagattgactatgagcagtgcaaagccaaagttagacggttagtcgataaacctgccaaagatgcggccaagttgccacgcgccgagaaggaattgtcgatggccaaagagatttacgacgagttgaatgaccagctcaaggccgagttgccgcagttgattgcattgagggtgcctttctacgatccgtcgtttgaggcgttggtcaagatccagttgaggttctgtactgaggggtactcgagattggcacagatccaacagtacttggacccagcgtccagagacgagtatgccaatgggttgttggacggcaagattgatgatatgttggcacaaatgcaaggtttgagtataacttctttaggaaagtag

SEQ ID NO: 6157 - DNA, 982 bp, Candida albicans
atgacagttgaagaattaactgatgagataagtgctattgaagcaatttatcccgaatctgtaaccaatttaggtcctcaattatatacttttaaaataccaaatcatgaatcagttagtatccaattaaatttcccattgacatatcctgaagaaatccctcaattgttacaaattatagtagagaaaactactcaatcgtcatcatttactgatattgcatatttggaaaaacacgttgatgaaatattgcaaaaagtgtttgtgccggaacaagttgtattgtttgaattattgactgaattacaggagttttttgatcaatacgttgaagagcaccctgaaccagtgattgaaaagatagaggtaacgccaactaatgagaaacaatccaaacaagctacaccaattgagcagcatgatgatgtgcatcaagaattgaaagatccaacaattgattggattcagtctgatccaatagttgataggggttctacattcattgcatatgttagacaagtgaatactctacaagatgctcaagagtatttagatgatttattaacagataagaaaatagccaaggcgactcataatatatctagttggagaataaaaatggagaatggagttacattccaagattgtgatgatgatggagaaactgccgctggaggtagattactacatttgctacaagtatgtatcaataatgaaatattattacttcttattaatttctagtgaatttgtctatactaactttttttttgttctattctatttgaagatgatggatgtatggaatgttatagttgtggttagtcggtggtttgggggaactcatcttggaccagacagattcaaacatataaattctgctgcaagggaagcaattattaaagggaactttattgttgatgcaaatgataatacgaatggtagtaccaagactactaatgcaaagaaaaagaaaaaatga

SEQ ID NO: 6158 - DNA, 2358 bp, Candida albicans
  misc_feature (1934)..(1934): n is a, c, g, or t
atgtcattttttgggtttgatccagcagctcctcctcaaggagccaataaaaaagatgatgcttacgactttgaaaatacttatgatgggttaggtgaattggaagaagatgatgcattcaaccaagaaacatttggaactagtaccagtgatattagaaaggattttgattttggtcaaggagattctcagcaatccgagacccacgcaaaggcttcagcccctcctgctcaaactattagttatgcccaggcagcaaccgtcccagtaaatgatgatgagtttatgcaagaattatggggatcgtccaatgcaccaagtaaaaatcatgctgattccactgaagacaaaccagcaggcggtcaacctgagaagaaaattttgtctttagaggaaattgaggcccaatttactgcaattgatcattctcagcaaccaccacaacaggtacctcaacaacaatttcctcctcaaccttatggtgttccaggaatgatgcctccacctccacaatttggatacatgatggcgccaggatttatgccacctcagtatccttatccaggtatgattccacagcaaatgccacctatgcagcaaggtcaatttccacctcctcaacagcaacagcaacagcaacaacagcagcaacagcagcaaccaccaccacagcaacagcctcagcaaccaccaccacaggctactggtactgtagataaagaaaatacagaagctcctgttcgttctccagcttccaagaaagcccagaaagtggatttgtctaatttcccagttttaggatcaaaagaggcacaatcgcatcaacaaagcgctccacaacaacaacaacagcagcaacactatcaccatcatcataatcatagtcagcattatcagcatggtcaccatcgtgagcctctgcaagaactcacaccggagcagcaagaaaaagctgctagaagacaagaaaaagtctctcgaatcatgaaatattcaggaatcatgaatcctaaagataaagattttgtaactagattccaattatctcaaattgttactgaggatccttataacgaagatttctatgctcaggttttcaaagttatccatccaaaaacaattaatggtgttcaacaatctactcaacaaaacaattctattgctcaagcatacttggaccatagtggtcatagattggggggtcgttataagagagccgatgttgctttacaaagaatgcaacaacaagttcaaaaagcagttactgttgctaaagaaagaccgaagttgactcaatatgccaaagagggagctcttggtaagatttcttttggtagtggtaaaaagccaagacaacaattggaaattatcagtaaagctgctgagagacaaaagcaagaaaatcaagttggtggcaagaaagaaggggttaagcattatagcaaaaaagacattttgagtatattagaaaatattattggcgaattaatgaatgttgaaagtgaatcaagaactagagctgatgttgatactagtaaattatgggaatcattgaaagtattggagcaatcttcatcatctggtgatgaagaaagtgaagtcaatccattcattcaatgtttgaactataacaagatgttgaagattttgcttcgtcttttcaagtttttaaccagagaacaaatattaactattgtaacattaatcatgtctaatttagaaaatttgttggtgatcaagaatgggtcgtacactacatatcctaacaaaaaagtaccagaaaatattgtcaaattggtagaagcctatactttgacattatcaaaagtgttaatgaatgcagtgttggatttcaaatttaatgaaatcattgcgttattagttattttgattgaacacaataatgtttcatttgtatctactactaagattgngttatcgatattgacaacattgttatcacgtgcagaattgatcattggtgaagggtcaatatcagcaactgatttatcggaatggtcctcgtgttatgatgaattgtttacatcattagaatcaagaattgcagcaattttcccacctaaccctgaagatgttgatgatggttcttctggagaaaattatatatggcaatttttagccacattgtcgttaggtggtaaattgagtcatcaaagaattattgttgatgaagtacgtgatgaaattttcggagtaatgaatcgagctaaagccattgctaacaccgatatggctaacttgtacaagaaacaaaacttgttgaacaacttgaatatgtatttggttgttatggggttggttgcagatgaaactgaaattaaagaacttcaacaatag

SEQ ID NO: 6159 - DNA, 1560 bp, Candida albicans
atgagtgatcttgttaaatcttctgaagtcattgaaactactgaagtccctcctcataataacaataataataaaagacatttcaaatatgattctgaacaacgtaaacagagattagctggtggtgttaaattaaaagatgctttaatgattttatgtgctggatttgccttgatttccgatggatatcaaaacaatgttatgtcaatgatgaataaagtatttgcccttgaatatccaaaagaatataccgcatctttgtcaactcaagtttctaatgcttctttagtagggacaattttcggacaagtgattattggattaaccgctgattatattggaagaaaatggtcaattgtcactgctacatgttttttaatatttggtactatgatgtgtgctgcttctcatggtaaaactgttaatggaatgttttggatgttgactatattccgtggtgtcacggggtttggtattggggcagaatatccatcttcttcagtgacagcaagtgaagctgctaatgaatcagtgaaaagacgtggtggtgcatttatattagcaactaatttaccattatcatttggtggtccatttgccttgtgtatatttttaattgttcgtcgaatttgtggtaatcatttagatgccatttggagaaccatgtttgccattggatgtttttggccattatcagtgttttattttcgattgaaaatggtgacttcagaattatatactaaatcagcaataaagcaacgtgctccatattggttagctcttaaatattattggcctcgtttaattggtacttgtgttgcttggttcttatatgattttgttactttccctaatgggattttttcagcaggtattatttccaatgttatccctaaactggaaaagaataatttagaaaaaattgctgaatggaatttacttttaggtgccattgcccttccaggggtatttgttggtgcttatgttgttgatattttgggtcgtaaatatactatgatgattggattttgtggatatattgtgtttggattaattgttggttgtggatatcatcaaattaaacccataactgggttattcattgtattttatgggttaatgatgagttgtgggaattttggtcctggtaataatatgggattaacttcttcagaatcatttgctacaccaattagaggtactgcgtatggtatatcagctgccattggtaaagttggtgccgtagttggaactaaaacttttagtccaattcaaaagaatttaggtgataaatggacttttattattgctgccatttgtggattagctggagttttggtgacatttattttcataccacatttaaaagacgaagatttattagaagaagatgttaaatttaaaaattatttgattgataatggttggaaaggtaaatttggtattcaagaatatgatgaagaagaagatttggaaggtagtagtgaagattcatccgatggtgaaattgtgaaaaataataccaaaaatgatgtggaaaaagtggatgcattgaaataa

SEQ ID NO: 6160 - DNA, 546 bp, Candida albicans
atgggtttatcattttccaaattatttgctaatctctttggtaacaaagaaatgagaatcttgatggttggtttagatgctgccggtaaaaccactatattatataagttgaaattgggtgaaattgtcaccactattccaaccattggtttcaatgttgaaaccgttgaatacaagaatatttcattcactgtatgggatgtcggtggtcaagataaaatcagaccattatggagatattatttccaaaacactcaaggtatcattttcgtggttgattccaacgatagagatcgtattgctgaagctagagaagaattacaacaaatgttgaatgaagatgaattaagagatgcattgttattagtgtttgctaacaaacaagatttgccaaatgctatgaacgccgctgaaataactgaaaaattaggtttacattcaatcagacaaagaccatggtacatccaagctacttgtgccactactggggatggtttatacgaaggtttggaatggttatctactaacttgaaaaactcttcataa

SEQ ID NO: 6161 - DNA, 2358 bp, Candida albicans
atgacaacaaatcaatcaatcaatacaacaacaacaacaacaacaacaacaacaacaacaacaacaacaacaacaacactgtcaacacaatcaatactgccatttgtcccttatcatcccaacacacacatctttatcatggttcagaatcaaaagacacctaatcataataattctacattatatatatctcccgttgttaataaaaaaaatgatttaatgtatgttacaccaccaaatcccaccacggtaacaaccaataaattattagaaacccctggatccaataaatctacttcaacatcaacatccctgtttttccattttgatcgagcttctaatcatactttacatgatcgagtcactgacaataatttattagatgatccattaacaccagttgataaattacgattatggagacatgatgcgattatgcaacatcaatataaaactgcagaatttattggtgataaaatattagaattaactaatgatgatgctaatgatgcattttggttaggtcaagtatatttcaatcaaggtaattatttacgatgtaaaaatttattaacatcaaatattaattatcaaaatctgataagttgtcgatatttggcaggttatagtttaataaaattagaaatgtgggatgatgcattggatttaattggtgaaactaatccatttaaaaataataatgatagtggtagtagtagtactactactactactgatggagggataaaacttgaatcatcaatgtgttatttacgaggattaatatatgctaatcaaaataattttgaacgagctaaggaatgttataaagaagcatgtattgttgatgttaaatgttatgaagcatttaatgaattaattatgaataatttaatgacccctaatgaagaatgggaatttgttatgactcaattaaatttccgagataatttagatgataccaacaatgatgaattgataaaattactttatatgacaaaattaagtaaatatttaaacccggataaattcaatgaaagtgaacatatcctcaaagaagaatatgaattatatgacaattgtgatttaatgttgagtcgagctgattatttatatattcaatgtaattttgatgaatgtttgaatttatgtgaacgaattcttaataaagatgaatataattttgatgttttaccaaattatctaagttgtctttatgaattgggtgggaaaaataaattatttttaaaagctcatcaattagctgaattacatccaattaatcctatgacttggttagctattggaacttattatttatcaattaataaaatggtggaagcaagaaaatttttcagtaaagcaactttattaaatccaaattttggtaatggatggattgggtttgctcatacatttgctgctgaaggtgaacatgaacaagcaattagtgcctatgcctttgccgcaagattatttcctggaactcatttacctaatttatttttaggaatgcaacatttacaaatgaataatttaaatttactggaagaatatttattagcatcatatcatatttgtaatagtgatccgttattattaaatgaattgggagtaattaattttcataaaaatcaatttgataaagcagaattttttttacaagaagctttaaatgctgctaaaaatttgaattctgattctaaaacttggatttcaattcatgctaatttaggtcatgtatatcgtcgagcaaatcaaccttataaggcattagattgttttaatcaagttttaaaaattagtaacaaaaatgatgctaatatattatcagccattggattaattcatttaagattacaaaatattttccaggctatagaatttttacatgatgcattggcaatttctccattagatcctattgcaagtgatttattgaaaagagcattagaagctaataaagaaaatcaagaaattttctccactaccgaaaaattatttcaattgaatttacctatagaaagaaggaaatatgaaagtagtagactagctaaacaacaacgacagtcaagatgcagtattagtggtggtggtggtggttgtggtggtgaagaaaatactaagaatattgttacaccattaacaacaaaaatacgggatagacatattaatgttggtaatagtagtatagatccagtattatttgttaatgacccaacaggtaaaaatgaagatatacaagatgatggtgaacccgaaggtgaaggtgatgatgtaactttattagctcaagaattacaaaatggtgaagcttcaagtgatgatgaagatgtaatggatatagaaagtgattaa

SEQ ID NO: 6162 - DNA, 1332 bp, Candida albicans
atgtcatacaataacggaggatataataatagaaacggaggtagttacggtggaggctacggcggtggtggtagcagaggtggaagagatggctacagtggtggtggcagaggcggtggctacggtggtggtgatagagatcaaggtggatacagaggtggaagattcagtggtggtggccgtggtggtggtagatttaatgatgctccaagacaagaattaactgctccacaatgggatttagaacaattgccaaaatttgaaaaaaatttctattcagaacatccagatgttgctgccagatctgatagagacattgaacaatttagaaaagaaaatgaaatgacagttaaaggtcatgatatccctcatccaatcaccacttttgatgaagctggtttcccagattatgttttacaagaagtcaaagatcaaggtttccctaaaccaactcctattcagtgtcaaggttggcctatggctttgagtggtagggatatgattggtattgccgccactggttccggtaaaactttatcttattgtttaccatctattgtccatattaatgctcaaccacaattacaatatggtgatggtccaattgttttggttttagcaccaacaagagaattggcagtgcaaattcaaactgaatgttccaaatttggtaaatcatcaagaattagaaacacttgtgtttatggtggtgcaccaaaaggtcctcaaattagagatttagccagaggggttgaaatttgtattgccactccagggagattaattgatatgttggaagctggtaaaactaatttgaaaagagtcacttatttggttttagatgaagctgatagaatgttagatatgggttttgaaccacaaattagaaaaattgttgatcaaattagacctgatcgtcaaactttgatgtggtctgctacttggccaaaagaagtgcaacaattgactagagattatttgaacgatcctattcaagtcaccattggttcattggaattggctgcttctcatactattactcaattggttgaagtcattgatgaattttccaagagagatagattagtaaaacatttggaatccgctttaaatgaaaaagataacaaaatattggtttttgcttctactaaaagaacttgtgatgaaatcaccacttatttaagatcagatggttggccagcattagccattcatggtgataaagagcaaaatgaaagagattgggttttagatgaattcagaaagggtaaaacttctattatggttgcaactgacgttgctgctagaggtattggtatgtataatttttaa

SEQ ID NO: 6163 - DNA, 1893 bp, Candida albicans
atgtctacaaatcctgaaaaacctactagaaacgaggacttgtttgaaaactcaagttcctcatccagtgttcctcacaacaaagaagcctcggagttggaatcggtaaactctactgctgaaagagaaggaggcgaacatggtaatattttagctcagtacactgaagagcaagtaatgcaaatgggccgtaactacgcccacaagtacgacttggacccagatttgtttggaagagctgctgcccttgctagagcacctagcgccttcaattccatgccctttcttaccgacgaagaaaaacaagggttgtatctcgaagcaaccaagaaatggcacatcccgagaaaattgattgaagttattgctgttggtgctattgctgctgccacccaaggtatggatgaaagtactatttctggtgctaccttgttttacccaaaagcgtttggtgtcacagaaatgaaaaacgccgatttaatcgaagggttggtcaactcagcaccatacttgtgctgctcggtcattgcatgctggacatccgattactggaatagacatttgggtagaaaatggacaattttctggacctgcttgatttcggccgtcacttgtatttggcaagggtttgtcaacaactggtggcatttgtttattgccagattcttccttggattcggaattggggtcaaatccgctactgttcctgcttatgccgctgaatgtacaccaaaacacgttagaggtgccttggtcatgttgtggcaatttttcactgccgtgggtatcatgtttgggtttgtttcagcattggcattctactatgtgccccacaagagttttggtacggggttgaactggagattaatgcttggatccgcctgtatcccacccatcattgtcctattccaaatcccctttgtgccagaatcacctcgttggttaatgggtaaagaaagacacaaagaagcatttgaatccctaaaagccttgcgttttgaagagattgctgctgctcgtgattgtttctatcagtatgtcttgctaaaagaagaaggtacttatgacatacccacctggaaaagattaatccaaatgttcaccatcagaagaaatagaaacggggctattgggtcgtggatcgttatgtttatgcaacagttctgtggtatcaacgttattgcttattatgcctcctcaatctttatcaaggcaagatacagtgagatcagtgccttgcttgcatcgtgggggttcggtatgattaattttgtctttgccatcccggcatttttgacaatcgacaagtttggtcgtcgtaatttgttacttttttctttcccgctaatgggggttttcctattgattgcggggttcgggttcttgatccacgacagacagggtcaattggctatggtcacaaccggcatctacatcttttcagcaatatactcaagttcagaagggccagtcccattcacatactctgctgaagcattcccattatacattcgtgatttgggtatgagttgggcaacagcaacttgttggttctttaactttatattggcgttcacatggccacgattgcaaaatgcatttactccaaccggggcttttggctggtacgcagcatggaacgtcattgggttcttcttggtgttatggttcttgcccgaaactaaaggattgacattagaagagttggacgatgtgtttgccgtgccaatgtacgagcatgcagtataccgtaccaaagagctcttaaacgggttccaaagagttatcttgcgccgtaacattcctccaatgccaccattgtaccaccaccaaagaatggccgttaccaaccccgagtggaacgataaaaccgaagtcgaccatatcgagtag

SEQ ID NO: 6164 - DNA, 2694 bp, Candida albicans
atgatccctagaaatggacgactaataatgaaaagcagggcattgccattgcgaacatttgtcttattaagatcttctgcacataacacccactttaaaaatgtatcaacatttgttcctacaagaaatttgggattcctcaaggttctaactagagcagtcaaaatgcctgcttatataggaggaaccatggcagccggaggtacttatgttgcttataaagttgaacaagcaagtagctacacacaagacaagttatctgctttcaaggatttcgcggatggcgtttttgataaaaccggcgatttctttaaaaaccttggtggaactgatggcgcaacaggtggcaatggtgccgaagatggggcatcatcaggtggtgctgggggagggggaggaggcggcggtggtggaaatgatactgctactgcggtaggagccactgcagcagcagtcggtctcacttccgatgaagatgaatcaaccgaagcagaaacagatattgaggaagaagatgaagaaacattgattgaagatgacagtgacgacgatgatgatcttgcaaatgatgagacagacgatcatatgcttaatttaacaagacaaatgattgaaataagaaaccttttatccagtttaaaccacgatggaattaaattgccttcaattgttgttattgggtctcaatctagtggtaaatcctcagttttggaaagtgtagtgggtcaagaatttttaccaaaagggtccaatatggtcactagaagaccaatcgaattaacattagttaatacaccagaagccgctgctaatgtggcagaattcccagcattgaagatgtataacttaactgatttccagcaagtgcaaaagattttatttgatttaaacatggcagttccagcatctgaatgtatttctaatgaccccattcaagttaccatcagatcgccaacagtaccagatttatcattggtcgatttaccgggatacattcaagttgaagccgctgatcaacccatagaattgaaaaccaaaatcagggagttatgtaatagatatttagaaccacctaatgttatcttggccatatctgcagctgatgttgatttagcaaattctgctgcattgagagcttcaagacttgctgatccaagaggagaaagaaccattggggtcgttacaaaattggacttggtcgatccggaacaagcacgtaaaatattattgaacaaaaaataccctttgaaattaggatatgttggtgtcataacaaaggctccacaccccaaggccagcgcaagtggattattttccagaaaacaagtgacagggtatcaggcgtttgtggcacaacagaattttgaacatactttcttgaaagaaaacaaagaagcgttttttgggtgtacagttggtacgagaaatttgaagaagaagttaatgaaagtgttggaaaaaaccatggctgcttctttaagaccaactcatttggcaatacaacaggaattggaagaaacttcataccaatttaaagttgaatttaatgatcgtccattaacaccacaaatgtatttggctaataatatcgatatgctcaagttaggaactaaagatttgagtcataacttttcaagaaatgaattgaaagcaatcttgaaaaatgcattagatcaaaaagttttggacttgatggcagaaagatattggaacaagccgtttgaattgaaaggatcttccgtggaacctgatttgcgtgaattaactcaaataaacattgataatgatatttactggcacaaaaagttggacttgactacatcatcattaactaagcttggggttgggagattatcaacaaatttgattacaaatgctttgcttacagaaattgacaatttagtggacaatactcaattacgaaaccaccctatggcaaaatctgcagtacgcgatgcagcaagatcagttttaggaaataaatattactccactgccgatcaagttgaaaactgtatcaaaccatacaagtatgagattgaattggaggatcgtgaatggcaaacatccaaagaaaatgcagttactttgttgaaggaagaaatgcgacaatgtgaagaagtttaccatgatttaaagagtcaggttggtggaagaaaattgcaacaagttgtgacttaccttgagaaattaaagcaactgaacaactcagatgttgatttaaccaccaatgaaacattaggtttttcaccaactttaattcaacgtggtaaagaagcgattttcctcaaagaaagaatttcgttgttaaaaatgagataccagtttgtcaaaaactctaaaaaatgtaaaaagaaggagagtaagtatcaatgtccagaaatattcttggatgcagtggcttcaaaaataacttctacttcaatattgtttttaaacgtcgagttgttgagtgatttctattacaactttcctcgtgaattagatttaaaatttttcaataatttaagtaaagacgaaattgaaaaatttgccaaagaagatccaaagatcaaaaaacatattgaattacaagaaagaaaagatttattggaaaatgctttaagtaaagtcgaaagtgtcttagctgtacaaagaactacccaaaaggataatacagaggatcgtaataagaaatctgtttttggctggtaa

SEQ ID NO: 6165 - DNA, 1695 bp, Candida albicans
atgaactctagacctgcacctccgcaaccacgaccaccacaacaacaacctcagcaacctcagcaacctcaacccaaccaacagaggcttccctttcgaccagacgagtcacgagctcgtcgtttgaatcaaccacttgaacagcatgcaaatccaatcaatccgtctaattttgctgcaagagagtacacagaacaagaacataaggacatacaaacgaaattaaataaatcgttgggtcctgaatttattagttatcgtgatggtccaggtggaactcgtgttcaatacattgaaggttggaaaatactcaatttggctaatgaaatatttgggtttaatggatggaactcacaaattgtgtcatgtcaagttgattttttagatactcatggtggtagcggcaaattttcagtagggatttctatggttgttcgtatcacaattagagatggaacttttcatgaagatgttggctatggatctattgaaaattgtagaagcaaaattttagcacttgaaagatgtaaaaaggaagcactcacagatggattaaaacgatgtcttagatgttttggtaatgttttgggtaattgtttatacgacaagaccattgttgctcaaatgaagaaattaaagaaatttccgatcgagtttgatccaaatgattattatcgtgatccattattggttgaaagagaaagaaagaagaatataattgaaaaacaacatgaagaacaaaagagacaacaagaagacgcgtcaaggttggataattcaggtcaacaggtgcagcaccagcaacaaaataactcaaacgtagtttcaaacggatcaattccagtaaatgggcaacaaaatcatcaaaacaaaggatctgatattgtcgaacctctagaagcaaatcaaggtaatactcgtgcaggacaagttccacagctttcccaccatgcagcagcttttgttacaccaaaactgccaaccaaagtggtcagctatgttccaacaagtaaagaagctgaagagttggatgattcatttatgttcagtgatgatatttttgatggggaatcgcagagtatttactatcctccagaagttcgggaacatgaacaaaatcaacaacaacaaaaagaagaaaaccagggagtagctagaaatggtgcaaccaaagaaacgacaaacaatggacgatctgaaaatcgacctcaaaacgagtctatggcagttgatcaaaatccaccggtgctcatgaatgcttttgtgactgcaaaatcagctgaggtattacaacaatcgccaacagttgaagcagctgccaaaaacattgtccaatttgatcctaaatttgtatctcccaatatgagaagaactgttgatcctaccaaatcagtaccaattaaacgaagtgatattaaaaatagtgtcgctacgacaccgtcaccattgggtgtaaacacatctagtaatcgaattaataaacccatgataacatcaaacaataataataatatcaacaatatgggtaagaggattggaatgccacctcaaccaagaacaaacaaactagttaattcgggaaataatccttcttcgggtataccgcacactgtttctacttctgttaatggtgcaagtggtaatgagaatgttgaaaataattctacaatagctaatacgactgttaaccaataa

SEQ ID NO: 6166 - DNA, 2124 bp, Candida albicans
atggctgacgcaaaagttgaaactcacgaattcactgctgagatctctcagttgatgtctttgatcattaacacagtctattcaaacaaggaaattttcttaagagaattgatctccaatgcttctgatgctttggacaaaatcagataccaagccttgtctgatccatcccaattggaatccgaaccagaattgttcattagaatcatccctcaaaaggaccaaaaagttttggaaattagagattctggtattggtatgaccaaagctgacttggtcaacaatttgggtactattgctaaatctggtaccaaatcctttatggaagctttaagtgctggtgctgacgtttctatgattggtcaatttggtgttggtttctactccttgttcttggttgctgatcacgtccaagttatctccaaacacaatgacgacgaacaatacgtttgggaatctaacgctggtggtaagttcactgttactttggatgaaactaacgaaagattgggtcgtggtaccatgttgagattgttcttgaaggaagatcaattggaatacttggaagaaaaaagaatcaaagaagttgtcaagaaacactctgaattcgttgcttatccaatccaattagttgtcaccaaagaagttgaaaaagaagttccagaaaccgaagaagaagacaaagctgctgaagaagacgacaagaaaccaaaattggaagaagtcaaggatgaagaagacgaaaagaaagaaaagaagaccaagactgtcaaagaagaggttactgaaactgaagagttgaacaagaccaaaccattatggaccagaaacccatctgatatcactcaagatgaatacaatgcattctacaagtctatttccaacgactgggaagacccattggctgtcaaacacttttctgttgaaggtcaattagaattcagagctatcttgtttgttccaaagagagctccatttgatgcctttgaatccaagaagaagaagaacaacatcaaattatacgtccgtagagtgtttatcactgatgatgctgaagagttgattccagaatggttaagtttcatcaagggggttgtcgattccgaagacttgccattgaacttgtccagagaaatgttgcaacaaaacaagattttgaaagttatcagaaagaacattgtcaaaaagatgattgaaactttcaatgaaatctctgaagaccaagagcaattcaaccaattctacactgctttctccaagaacatcaaattgggtattcatgaagatgctcaaaacagacaatctttggctaaattgttgagattctactctaccaaatcttctgaagaaatgacttccttgtctgactacgttactagaatgccagaacaccaaaagaatatctactacatcactggtgaatccatcaaagccgttgaaaaatcaccattcttggatgccttgaaagctaagaactttgaagtcttgttcatggtggatccaatcgatgaatatgccatgactcaattgaaggaatttgaagacaagaaattggttgatattaccaaagactttgaattggaagaaagtgacgaagaaaaagctgctagagaaaaggaaatcaaagaatacgaaccattgaccaaagctttgaaagatattcttggtgatcaagttgaaaaagttgttgtttcctacaaacttgttgatgctccagctgccattagaactggtcaatttggttggtctgccaatatggaaagaatcatgaaggctcaagctttgagagacaccaccatgtcttcttacatgtcctctaagaagacctttgaaatttctccatcttccccaattatcaaggaattgaagaagaaagttgaaaccgatggagctgaagacaagaccgttaaggacttgaccactttgttgtttgatactgcattgttgacttctggtttcaccttggacgaaccatccaactttgcccacagaattaacagattgattgccttgggattgaatattgacgatgattcagaagaaactgctgttgaacctgaagctactactactgcctcaactgacgaaccagctggagaatctgctatggaagaagttgattaa

SEQ ID NO: 6167 - DNA, 1362 bp, Candida albicans
atgaagttcactacactcgctactatagcatctactttgttatttgctgctaatgctaatgctgacacatgtaacccattaaagtcaagtgattgttctccagttcctgctttgggatcatcatttttagaaaaatttgacaatggcttgggtcctcatttcgaaagtttaaagaagcaaggtactattgactctggttctaatggtttatctttgactatgaaaaagagatttgataatccttccttcaaatccaatttctacatcatgtttggtcgtgttgaagttgttttaaagggggcagaaggtaaaggtatagtgtcgtccttttacttgcaatcagatgatttggatgaaatagatattgaaatgtttggtggtgatccataccaatggcaatccaattatttcattaaaggtaatactgctacttatgatcgtggtggatatcatgatatcgccaacccattgaaagattaccatacttatgttattgattggaccaaagatgcagttacttggtccgttgacggtagtgttatcagaaccattccaaaggataatgcacaaggtttcccacaatcaccaatggccatttatgctggtatttgggctggtggtgatccatctaatcaaccaggtaccattgactgggctggtggtatcactgattactctcaagctccattcactatgggtattaagtctgttttggttgctgattattcttcaggcaaacaatacagttattctgatcaatctggttcttgggaatccatcaaagccgatggtggtaaagttaatggaagatacgaccaagcacaagatgatatcaagaaattggaaagtggacaatctgttgactccaatgatagttcatccagtccatccgcctcttcttcagattcatcaagcacatcttccgcatcatccagttcttcatccagctcaccttcatctaccacttcatcatcatcatcatcatcttcctcctcctcttcaagctcttcttcatccagcgaaaaatccaatgcagttccaagtgcttctgtgattgtcttcattggcactaaaggaggtgataagactaccgttaccagttcttcgggagtttctgttcctacatctgcatctgtttccactgcagctggtactactagtgggtctgcaaactctgctccagcttcagctgcttcaagtactgcctccactgtgtttatctcaactggtgatgccgctccatcttcctctgcttcagaaaaaccttctgttctgactactgaaaataacggagccgttagtgtcgctaaaactacctccctttttggctttgttgcattgattggtttcttatttgtttaa

SEQ ID NO: 6168 - DNA, 4938 bp, Candida albicans
  misc_feature (2662)..(2662): n is a, c, g, or t
atgtcactgcctaacacgtcattccatagcgattcaaattttgaatcagctgtacaagatcttgaacaagagaagaaaatggtggcagccttaaagagactatctataggtcatatgatgcaatatgatcccgacttgccaccaggcagtatggatgatattgatccctttgcaaacaataacaacaacagcaataccgctagtaacaataaccactataatggtcataccagagatcacaccagcaacaacaacaatacacacaatcattctcccaactcaaaattgaaccaccatcgtggtcaaagtccttatgatgaagatttaattccacagaatatccacagatcacactcaactcgatcacgatcaaaatcacattcaacttctccttctacttcgcctcaacacaagcaacaacaacaacaacaaccgcaaccttttccacatgaaccacagactcctccatataacaaatcaccaagcccagtcaagagacgtagtttttacgacaattccagcgtgttgacgtcagaaagtcacgatatttttttcgatgccgaggatgaagtttatgatagttcatcccctttgttgtgggtaccagctaactctcatcctcaagtgaatcctgaatcgttcaagagtttaatcaaaactcaagtggaagagatattggaaagaaagctatctcgaaagtcaactatttcaagaaagtcaactttatcacgcagctcctcaaccagtaccaaagagacattagccccagaaccagaaataagtccagaactggaatgtgatgtgtcacctccttctccagtaagaaaatcttccttgtcttcgtcgtcacaacaaaatcaaaatgaagacgtttctcgaaaatcgtcgtcctcggtttcttcaacttctccacaaaaagatccagctaagagagaatcttggtacttcaacaactcaaaaagatacctgaatccatcattgcgagagctaacttcagaattggagcagttgtcaaaaatggcggggatggacaagaatgacgcagtaactttggcaagaactttgtcggcacaatcattggggtatacagatgtggaaaaattagcatttgacgaattagatagttcacaaacaaccgctactgcaacaacacccaattcactgggttctccaggaagttatgactctgcaaacccacctcgcaccacgaccttgcatttacaacaacgattacaacatcaatttcaacaagctcaaatcaaggcagaaagggaggcagaaagatcgacaagacatcaacaaagcgaacaacagtggccagtatcgaatgacgatagtcacaaatctctgtcacagttgacagcaagtgagggaggttctactgctaatgcttttaccagtgctgggagtggtgctgactttgccttgaaacgaagtagaagaactgattaccggaaaaaggaaacagattcgaaacaaaagacttcgaataattcgcctcctacaagaaagtacaatgtccggaattcccagttgttatttaactacaagaaaccagtagattctccttcgctgtcaccttcaccttcaccatctacatctcaaagcatgatgggtcacagggtgaaacacaagaaatctcaaaagccattggaagcagcattggctaacccaatgatggatggttcagatatgtcacataacccgtatcccactgcttcaaccactattgatttcagtcgtatgggtgctaagaaatcagccagacaatcacttagtccagagaatgcaatggatggcagatctcgaacaaagcccgaaaacaagactcatcgtggctatctgcatcaagaaaggtctcatccttatcatcaacaaccacagcctcaagtgcaacctcaaacccgccaacaacttccaccagcacaacaagctcatagacaatcgacgagacaaacccacaatcatccgagcacaggagttgaaaagcatcaccgacaggataacaagcgtgtaatgctgtcagcttctaatacagacataaatgattttatggctcaactgaatcaatttcagactaatggaacaagaaaccatcgatatgacaacctccataaaaaggataagactgcatttttgccaaatgaagaccaccaacgtaagtcccattcgacaagaaattcaaatgtaagaaatttgtcttcctcgtctcaacagcatttacatcaaccgtatctgacaacttctgttgcgcccaagtcacgtcaactacatcaaaatttagacaagttgagatccgagatcaatgaatttaaggaaagcttgaataaatcggaattacctggtgaggaatcaaaaagagaacacagactgcgtcacgaccagcaccaccaacaacgacaacgaccagcaccatcacagcaccaacttgagcctcgcaattacaaccacaatgaccgtcaccaaagacaacagcatgaacatgtacaaccccaacaagtccagcccttacagtcagatactagttttgatatcagttatcaagatttaagcgttgaagatcaattgggtattgaacaggaagcattgagagaattaggcaaggaaaaggggcattctcatgagattgatatagatgatgcatttgatgaaaatttaaaanttctgcctatcaatgaacgacatggctctcaattcacacttgatcatgacattttggacagctttaatttggtagataatcagttggttggatctgcagatgaaggaattgataatttgaagggtaagaatgaaatacccgttgggcgacaacaaccacaacaacaacgtcaacaaccaagagctgcttcgccaccatcctcacagcagtacttggggcatgatgaattgcacttgcaacaaggtaaagatacaaataaaaaagttggtcctcgtttaagtattgatacattgcagaacaagcctattcaccctgaggaaactgcaactggatttggaatgaatgcgttaccttcccctacgttgcatttagatgaatctcaaaatagcactcctggacatctgagaaaggcaagcaattctgcaagctacgacgattactataatatagccgacaaatcatctactgcgggtacccccaaaacaaagaaggagaccaaagttaaaacgaaattattcaataaagaccctaatttggagattatagactctgataactataaggaaaaaatgggcattgagacatctaacaataaaaaattgaaaaagaagaaatcttttggtttgcttagtacaacatcatctgtgggagcaaatgatacatctgaaaatgaagggcccaagaaattgaaaaagaaaaagtcgtggggctggttgcgggagcgttctgccagtgcctcgtctgcagatatcaacaatttgccgcctttgcctcttgataaactacctacaagatcattctcaaatcccgaaacgtcaactgaccaacaccagaaacatgatcttgagaacggttcagatcttgaacgtgaattggaacacgaacctgaacttgaacttgagttggagctggatcttgagtttgattacgagcaacaaagaaagcaccaagatgcttcaatggtaaatgattcaagctttgcagttgattctatctctatgaagtcgacagacaaggaaaacgtgctttccaaatttttcaagaaaaaggcaaaggtaccaggttcaagctcacagtcagtattttcatttgaatcaaaaggttcaggggccagcgtcgactatgaatcggacaacgacgcgaaactgatcaaaaagaagggcaacaatagcagcaggttattcaagaagaaatcaagggccaaattgtcagaacaagagaattcagtgaataaggaaaagcttcgacctttgaatttagtgtcaaacgaatcgcagacgatcgaggagaaagagaatttgcgacaaagtaatggcactcgtaaggcagaaagagttgagagtcaagagcaacaggaggaacagttccctgtaacctcgtcgccgatacatcaattcaacattgaacatctcaaagacgactttgtcactcttggggagaaggacgatgttttagattctggtactgatgacttggttgaagatgtaagatctcgtaacattcagagcacaatagttattgttgatgaggatgaaactcctattcaaaataacaatgataacaaagatttggggatgctaaaagttgacgaattgtccaaaaagaaatcaattagcaggaaaaaacggaacaatatgcaaaagaagaacctttctactgaacttactgatacaaacaaagaggtagtagaggaggttcttgcaactgagcaaagtgtcaaaccaagccaaggggaagatcttttgtctaagaatgaagataaagagaaattagatatccaagaaaagttgaagaaatcaataaaacgtacatcaagggccaaccagcctattgagtttactgattcagcctttgggttccccttgccaccaccatctcaatcaactttagtgatgcttgactacagatttccagttcatgttgagcgtgccatttatagattgtcacacttgaaacttgctaaccctaagcgttcactaagagagcaagttttgttgtcgaattttatgtatgcctacctcaacttagttgatcatacattacatttagagcaacaaaatatgagcagtgaggatggcgatcagatggaacgtgacgacgacgaagaagaagaaatgactgacactgatgagaaagacatgatttttggagagagtaatattgccgatgacgatgatcttattcctgaagaagcaaatggtgattcgattgggattaacttagatatggatggtttacataggaaacagcatcatcaatctggaatcgaagtatag

SEQ ID NO: 6169 - DNA, 2397 bp, Candida albicans
atgccacccataggatcatctgatcaattcattcaccaaattacacagcaatttgtgtttcaacgtttatggactggaaatgcaacaaccccagaattagcaccagcttcaaccccctacaatcgattggtatgccgtaataataccgatttattctatgcaactggcaatattgttcgatgctgcacaattagtcccaatcataaaaactacaagctatttaaggttgagaatcaattctatgaagtagcttctttgttgatgaataaatcgggtaccttgttagcgatcatcggagaagagcaggtcgatgttgtgtcattacccaccaatgttatgaaaagtagtggtatttatgttgatggtgcatcgttcaagattaagaatttaagaggtaaggtaagaaagtgtgtttggcaaacagttgcggcaaacgattcaacattagtagtgttgactgataattcacaaatccaagcttatgatttgacaaaatctttggaggtccctgtgattgatgttgatttgaaaagatatgccaactttgcaaatgaggaagccatttctattgcatttgggtcgtctaaaaatttagctggtggattgactttgtatgtctcaacattgtcaaacatctatgctatttatccattcagtgcaaaatttggtaatttggccaccactaaagaagcaattgatatagctttggaagatacaaaagcagctatggagttgattcaggaaaaataccctgtaaacttattagacacggcaactagtactttgaataaagcagctatccgacaatttgagtattacctgcatttcaaatcccagttaagtggcgcgttaccaataattaaggaagtaagagacactcatacaaataatccatacgagctttttgttgttagtcagaccttaagtgattggactggttacagcttacaaggtcccctcatttcaagtaatgctggtataaaggatttagcttcaattggtgacaatgatttagttagtatacttgctagtatcgatgctaatgctacagttacttactatgctcaacttgcacccatgttgatgaagtacaacataatgagtatagcaagtgaaggtgcaccaagtgaatcaagccaaacagtttgcaaaccaaagtatgttaaaccaaaaagaggatttggtttcatagacaactctgaggaagaggagaaagcattggtaaaactgaaacaatcccaggaaagcttttggaaagaagaattgacaagcttggatcttttgcaaagggacaagcttccagttgatgaaaatgatgatgctactggcttcccaactttctttggagaaattgattctaatagattcagtgtttgtgtgaattccaacaaattggttttagttgattgttcttgggtgaagacttttgtagacgatcttaaagaagacaaaatagattccgtgtcgatcacagcaaattatggtattacctccacagaaaaagaacccatcacggcatttgcatatataaaagacgatgtcacttccactggcgaatacttgactgtttgcagaagtaaacttgtcaatgacatggaagttatccagattgtggataaggcagtcagcgatcaggaagaagccacaagcactttactattgacagaagagccatataaggaattaccattaacatacattccatctaaacctttcagtgagttggaagaagaattagaaagtttggggaagatcaatattggcgctgatgttaaaggcaatgaggatttgaatagtttgactgttgatagtctttcaaatttgaactctttatctgtgaggacaattcaagttgcatcctcctatacaatatttggtattaaattgcaatcaagaattttagccaatttggattctttgaaggaacaattacatatacttgaaaaggttaagaatgagtatgatggagatcaaaaagaccacacagaaaaattggaaaagttgacagagaaacaagcaaaattagatgaacgtatgataaaattacagcaaaagatatttgatggtttgaataagttcaagcaagacaagacgttgccaatatctgaggcagaaagaaattggttcaaagaaatcaactctatcaatgcattagtgaattcttctacagataatgaagtcgggttgacaaaaaagattgagaatttatcgttacaagttcgttccattattgaagatagtggaaaggagaagaaaccaaaattgactgctgtggaacagttagaattggaaaaacgattaagcaaattaaagaactggttacagcgtgaagacaagtctattgaaattttaaaagacaaacttactaattcattaaaattaataggtgacaaatag

SEQ ID NO: 6170 - DNA, 645 bp, Candida albicans
atgccatcatcattagaaccatcatctaaattagctcttaaaggatcactgaaaattgtatgtgattattttgaatttgctttaaattcaatattatatcaaagaggtatatatcctcaagaagattttgtcaccgttaaaaaatatgatttaccaatggttataaatgatgattatgatgtacaaaaatatatcaataatattatgaaacaaattaaaaaatggatttatggttcattaatgtcaaaatttataattgttattgtatctaaaacaaatttagaaaatattgaacgatgggaatttaacattgaaacgaaagatcaagaagaaaccaccgaaaatggtgatggtgatggtgatggagttgggaaatcacgtcaagaaatacaaaaggaaataagaacaattatacgacaaattactagtctggtttcatatttaccagttttaaaagatgatgatgaatatacatttaatgtattagtatatactgatcctaatacatcggtccccattgaatggtgtgatactcaaggtgatgggaaggtactagatggtgataatgttgataatgtgaaatttacttcatttagtacagatatacatcaagtaggtacatcagtcagttataaatatgaataa

SEQ ID NO: 6171 - DNA, 441 bp, Candida albicans
atggttaagaaagtacttctcattaatggtcccaatcttaatttgttaggtaccagagagccagaaaaatatggtaccacatccctttcagatattgaacaagctgctatcgaacaagcaaaattgaagaataatgactctgaggtcttggcgtttcaaagcaatacagaaggttttataattgatagaatacatgaggcaaaacgccagggtgtcggttttgttgtgataaatgctggtgcttatacacatacatcggttggaataagagatgccttgttgggaacagcaatcccattcatcgaagtccacattaccaatgtccatcaaagagaaccattcagacaccaaagttatttgagtgataaagctgttgctgttatttgtggtttaggtgtttatggttacacggcagccattgaatatgcgttgaactactag

SEQ ID NO: 6172 - DNA, 1020 bp, Candida albicans
atgaccaaaatgtcaaatccactcaaagtaatagatatttcagaagactcaatcacaactgcaagagagttgcttgatgcagcaacttctcaagggtttttatttcttgaaggacatgatttcactcaagaagaagttgacaaattatttgaattatcgaaatcattttttgaattaccaaacaattataaatcaaaatatccagttgattcttcaaatcatggatatgtaatgatggggaaagaaaatcttgatcctaatggtcaaaagcaaggtgacccaaaggaagcattaaatattgccaatttgaattttgaaactggtaaatctttaaatattattcctgattggatttcggaaaaccaagaaagagatgagttgatttcaaacacaattcttagattatatcgattatctattaagattcttcgtatgcttgctcgagctttagaaatcgaggatgatgaaacccacagaataaaaggtgaaaattggtttgcttcaaaatatgccagtgattctgaatctggatctacatttagacttcttcattatccatgtcaaacatcattaaatccagaaagtgtgataagagccggtgcccatactgattatggttcaatgacacttttattccaaaaagagaatcaagaaggtttggaaattttttctcctatatcaaagaaatgggaacaagtcccattcataccttcaactattgaaaaaatggcacctccattagtggtcaatattggtgatttgttaagttattggacggcagggttattgaaatcaactattcatcgagtcaaattccctgctaaagcacaagaattgggacaagatagatattcaatagtatttttcagccatcctagtgataatgctttactagaacctgtacctagtgaaattattagaaaaattgagggaagaggtgctaacaaagaaacaacatacatcacagctaagcaacatttacaaaagagattagctgctacttatggatggaagaaataa

SEQ ID NO: 6173 - DNA, 741 bp, Candida albicans
atgtttaaacaaattataacatcttcatctactaaatcaacaagattgtttaccagctccactttaaaatatttatcaactagttcatcacttttaaaaccaacattagctgctgctgctgctgcttccatcaccaccaccaccaccaccactgataattctagtgaatatttaactactggaggatcaactcattcaattcctgctaaaggttttagactttctcaacctaaaacatgggaagaatctaatgaaagtgcattatctaaagccaccaaatttttatttttaagtgaaattgctcgaggaatgtatatttgtttagaaatgtattttagagctccatatactatttattatccatttgaaaaaggtccaatttctccaagatttagaggtgaacatgcattaagaagatatccaagtggtgaagaaagatgtattgcatgtaaattatgtgaagctatatgtccagctcaagccattactattgaagctgaagaaagaattgatggtagtagaagaacttataaatatgatattgatatgactaaatgtatttattgtggttattgtcaagaaagttgtcctgttgatgccattgttgaaactccaaatgttgaatattctactgctactagagaagaattattatataataaagaaaaattattggaaaatggtgataaatgggaacaagaattacaatattgtattgatgctgatgctccataccgttaa

SEQ ID NO: 6174 - DNA, 1719 bp, Candida albicans
atgatacttaccaaagaaaactcatcatattcatatgctaatgattttgatcaaacagttacactatgtccatcagaatcaactattgatgccactaacttggatttcatattaactactgaattgccatttttccctttagattatcaagattatcctttaatggatcttactactgaagaattattacaagataaatttcccaataccaaatttccttatgatgggtttataaatttccattccttaaaaatttgtagttcaaatgctaaacaaatgtcaaaatatttacaacttgcaatggggtttaaagaagttgcctataaagggttagaaacaggatctaaattaataggtgcacatgttatgcaaaatggatcaattacattagaaattatcaacactttggaaaccattgatgatgataatgttttaaaattcccatttttgcaaaatgatttaaataaatttcgaaatattaatcatgaatattttttagaaaattttaaattaactactgatgatttaatatttgattttgttaatagcagaatcgaaagtttgtcatttaaatcagattatcttaaatttggtaaacaattttataataatattataagatcagatgattatcaagaatcgatggccaaagttagtaatttcattgttcaaaccataaataattcagaagaaatttataatgatatgatggaatgtacattaattcagaaattcttgaaattacacgctgaaggggttatggatatagcattcaatgtaaatgatgttgatacaatattcaatcgagccattaaagctggtagtgggataataagattaccaaaaataatatctgatgaaaatggggtagttaaattggcgactattagtatacctaattctgatatacagcatacattgatagaaaacatcaattatactggacctttcctacctggattctctcaaccaatatatccattggccgattattatcaagttcaattaaatatgatgcctccagttaatttaacagtattggaccattgtgttgaaaattatagttggaatcaaatgatggaacaagcaaaattatatgctgatatgtttggatttcataaatattggtcagttgatgaagatgatatatctactgggttcacagcattaagatccattgttatgtcttcgagtaatggacaaatcaaaatgccaattaatgaaccagttaaatcaattatgaaaggccaaattgaagagtttaatgattttaatggtggtcccggaattcaacatattgcattccgaacaaacaatataatagaaacagtaatggcattaatgcaacgaggagtcgaattcaatcatacttcggagaactattataacaatttaaagcaaagattgaacaacgatgggattaagttatatgaagattttgataccttgagatcattaaatatattgattgattatgatccatcaacaaaaccaaaacctaaaccaaaacctaaatcaaaaaggaaaaggaataataaatgtaattatctattacaaatattttctaaaccattacatgatcgtcctacattatttattgaaataattcaaagacatcatcataatgggtttggtaaaggtacattcaaaggattatttgaaagcattgaagaacaacagaaattaagagggacatttgttaaatcacagaataattaa

SEQ ID NO: 6175 - DNA, 981 bp, Candida albicans
atgtcagtaagatcaattgctaaagtcgttaccccaaatccaccaagaccaggatctccagtgaaaatcagaaactcaattggatcatcaaatcaatttaatccatttttattatttgatcatttcacaattccatcaactggtggtttcccagctcatccccatcgtggccaagaaacaattaccttagtgttaaaaggtggtgttgctcatgaagatttcactggttcaaaaggtgttttatatccaggtgatctacaatttatgactgctggtaaaggtgttgttcattcggaaatgccagtacctaatgaagatggttcacctagtgttggtttacaattatgggttgatttacctaatgatatgaaagatgtgaaaccaagatatagagatttgagagaatgggagattccacaggtggttgcagacgatggaaaagttattgtcaaagttatttctggaaaatcacatggtgtagagtctcaaaaggaattagcatatactccaattaattattatcattataaagtcaaagctggtggtaagtttaaacaagaattactgcctggtttcaattatttcttatatgtgttgaatgggaaaaatttgaaattgaatggaaataccactgttgataaataccaaactgcttttttcaatgaaactggtgattacattactggtgaaaatactgctactgaagaaactgaagccaatgaatcagaatttgtattgattggtggtaaaattttaaaccaaaaaccagttcaatatggtccatttgtcgcatcaagtaaaacaggaataaccaaagcattattagattatgagcttgctcgaaatgggtttgaacatagagtgaaatggaattcattgataagtcgtggtgtcaataaatcaatggtgactggtccattgaatggatgtctaaaaaagagagccgctgataagaaatcatatttggattcaaaaatctaa

SEQ ID NO: 6176 - DNA, 2313 bp, Candida albicans
atgttcagtagacttgtatcttatcgatatccaattggtgtcccattaaaacaagcaaataggatcatgtcaaataagaaacaacaatcattagctcggttttttggaggtatcacacctccctcaggttcaaattcaacatctcctgaaaaacaacaatcattgacaagattttttggaagttcctcaaacaatagtagtccgaaaaaggcaaccactgaagctaaacagaaaagagaagctacaccacctaaatcgccaccccgttccaagaaagctagaattgaaacaaagtctgatgagagtagtagtagtagtagtagtaatggtgatatcgagatggaaacagaacccaaattggaaaaaaataatgggtctggcaatgatgttcgtaatgaagctgaagaattgatcaaactcagcgaatcagaacaagctaaacacagtaatgaaaaattgggtgtcaaaattccctatgccaaattagcatctgtgtttgaagcaattgaaaatgaaagttctcgattagcaattattgccattatatcacaattttttttggaagttttacaacaactgacaattgataaacttattcgtattgtctatttatgcataaatagacttggtcctgattatgaacccgggttggaattagggttaggtgaaaccattttaattaaagctattagtgaatgttatggaagagaaacatcgaaaatcaaagctgattataaatctacaggagatttaggtttaattgcccaaaaatcaagaagtttacaaccaacaatgttcaagactgccccacttgacgttgatactgtttttgataattcattgaaaattgccaaatcaactgggaaagaatctcaatcgaagaaaatcagtatcatcaaacaaatgttaactgcatgtcaaatgaaaagtagcgaagccaagtttttaattcgttcattacaagggaaattaagaattggactggctgaaaaaagtattattgtgggattagctcaagcatttgttaattatgaaaataaatctaataaaaaaattgatccatctaaattagctgaagctgaagaaattatgaaggaagcattttcacgtgttcctaattatgaagtggtgttgaaaactgcttatcaatacggtatcttcaatcttttggaacattgttttgttaccccagggataccgttgaaaccaatgttggcaaaccctacaaagtctatcggagaagtattggatcgtttccaaaatgaagaattcacttgtgaatataaatacgatggtgttagagctcaagttcatatattgtctgatggatccatcaaagtattttcaagaaatttggaagatatgacacaaacttatcctgatttgatttctattggtaagcaatttgccgttagtggtaatactatttccatgattttagattgtgaagcagtagcttgggatagagaagatcataagattttaccatttcagaaattaactactagaaaaaggaaagatgtcaatgaagaagatatcaaagtgcaaatttgtttatttgcctttgatttattgtattacgataatgaatcacttttacccaaatcattagctgaaagaaggaaaatcatgcaggagaatttatctccaattgaagatagatttcaatttgcaactgccacgaattcatcttccaatttggaagtgctacaacagtttttggatcaatcaataaaagattcatgtgaaggattgatggtaaagatgttaaatggactggaatcgttttatgaaccatcgaaacgttcaagaaattggttgaaattgaaaaaagattatcttgaaggagttggtgattcgttagatttggtagttattggagcttataatgggaaaggtaaaagaacgggaacttatggtgggtttttattagcttcatataatgaagattcaggggatcttgaaacttgttgtaaaataggtacaggttttagtgatgaagatttactcaatttatacaacaaattgcatccaacagaaattgcatcaccgaaaaattattttgtttatgacaccaataattcaaatgctgttcctgatgtttggtttgagcctagcatgttgtttgaagttttaacggcagatttatctttaagtcctatttataaaacaggtcatcaagaatttggaaaaggtgtatcattaagattccctagatttatacgagtaagagatgataaaggtattgaagatgctactagttctgatcgtgtttgtgaattttaccaacgtcaagcccatgtaaacaattga

SEQ ID NO: 6177 - DNA, 3069 bp, Candida albicans
atggatgatgaagatttatatgatgaatttggtaattatataggagattcattagattcatccgataatgatgatgatgatgaaaaccaagatgatttatttgcagcagcacaaccaccatcaattaatgataatgaatatctgcaagatgaagaagaagaagaagatgcaaatggaaaatcccagttagtcaagaccactacaactaacagtaatgatactgcattggttaaaactaatatagatacaaatcaagcagaaactatttatattcaatcacaaactcaatcactttccaatcaaccaataattcaacccaatcatgaaaaaaccatgaaacttgaatattcaattgataataatgatccacttactaataatttcccagaagtaaattattcacgagattatttaatttctttattaaatcaatcacctgaaagaattcgaaatgtttcaattattggagatttccaaagtggtaaaacatctttaattgatcaattaatcatgtatattcatcccaaaattaatattaaaaaatatttagataatcataaattagaaattgaacgagaattaaccataaaatcatcaccaataacattattattatcagatctgaaatctcgatcacaaattttaaatttaatagatacaccaggtcatgttaattttgaagatgaaaccttggcagcattaaatattactgatggagtagtattaattattgatgctgtattagggatgactatacaagatcaatatttaattgatgaagtgataaaacaaaggttatctatgattataattattaataaatttgataaattgattttggaattgaaattaccaattaaagattgttattataaattagttggaataattgatgatattaatgattatattaaatcaatcaccaccaccactaccaccactaccaccgaaaagaaaaaggagtataagtataagtataagttttcacctgatttaaataatgttctatttgcatcatcgaaatttggtattatatttagtttaaaaagttttgccaaattatatatcactaaacaaaattcattaatgaatattgatcaatttagtaagaaattatggggagaaatttattatgatcctcaaaatcataaatttactactactactactactactacttctactaccaccaccaccattaacaacaacaacaacaatagcttgaaacatctgtttatttcatttatattggaacctatttataaaattattacttatacaattactaatgaacctactgataaacgattatcgaaattattatgggaaaatttccgaatatcattacctaaatttgaatataaaaaagatgctgaaaatttattaaaatcagtatttcaaaccatttttaataattatgaatcatttgttgatagtttgattgaaatgattccgtcacctgctaaacaacaacccaacaactctttttcttcttcttcttcttcttctttgtcttctgtggacacattagctagggtgacgaaattaattgaatctagtgatgggaaatcatttagtgcattagtaagaatatataaaggaggtttaaccatgggagataaaattaaaatttatggtgaaaattatcatgaagataaagatgattataaattagaaatcattaagaaaatttatttacctggtggaaggtataattttcctataaatcaagcaagtttaggaaatattgttttgattgatggtattgattcaataattaaaaaagggtcagctataataaccaatgaatcaacaaatgatacaaaagatattgataaattgtcttttgttccaccatccccaccaaaatatacaaataattcagtgtttaaaattgctattgaaccagaaattccatcagaattaccaattttattagaaggattaagaaaaattaataaatcatatttatcatcaattattaatgttgaagaaaatggtgaacatataatattaactaaaggagaattatcaatggattgtatattacatgatttaagatttttcttttgtgatgatttagaaattaaagttagtgatccaatggtgaaattttctgaaacttgtattgaaaatggttacattagaacatcaacaacgacaacaacaacaacaacaaccaacgaggataaagataaagataaagattctttattatcgatgactataattgttgaacctattatagattataaattcagtcatgatattgaaattgggaaattaaaatttgataatattgatattgattctaaacaattgatcaaaatattgaaaacagaatatggttgggattctttagctgctagatctctttgggcaattggaccaattaatgatttacaaaatcctagtattttattaaatgatacattaaatcaacaccatcaacaagacaacaacaacatcattgaatcaattaaatcgtcgataatttctggatttaaatggagtattaatgaaggaccattatgtgaggatcaatttcgaaatgttcaatttacaatcatcgatattcccgcagacaataataataaaactccaccgctggataataataataataataataaattattattatctccagcacaaataatcccattaatgagaagagcatgtcataatgcaatcactaatgccataccaaaattaatggaacctatttatcaattaaatgtaatttgttcatataaagccatcaatgttataaaacatttattattaaataaaaacccgcagcaacagcaacaacaacatcagcagcagcaacaacaacaacaacaacgacgtggtgaaattgatactgtaaccccaataccaggaacacctttattttctattaaaggttatttaccagtaattgattcaattgggatattaactgatattaaattaaatactcaaggtcaagctataggatcattaaaatttaattattgggaaattgttcctgatgaattaagtgaagaatttataattaaaaccaggaaaagaaaaggtatataa

SEQ ID NO: 6178 - DNA, 579 bp, Candida albicans
atgtttaatttagtgactagggcacaagcagctgccaatctggcatttacttcatccatagtgataacatcagtagtgatagtgttgacattgttgcaattgtataaagacaatgtgtggtcgctcaacaccacttcaataactaacataagaccaacagcatcaattaaacaatcattccattatggttctttgaacaggaagccaaaagagaatgccaaaatccaatttgatttaagctcagatttgacaccattatttaattggaacaccaaacaaattttcatttatttaactgctgaatatccgggcaaaagtgaaggttccagcaataaagtcacattttgggataaaattataactaataaagaagatgctaatttaactttaaccaaccaaagaggaaaatattctgtttgggatgttgagaaatcattcagaggtagaaatgcaacagttagattagagtggaatatacaaccttatgtgggaccattaatttttggatctacagaaggattcggtgaattccaatttgctgatactcaaaaaaagaaagaatcaactaaaaacacttga

SEQ ID NO: 6179 - DNA, 3291 bp, Candida albicans
atgaggcgagcaaaatgtaaagaaagagaaaagctgagagaagaaaaaaaaaaccataacataaggatactacattttaacaccaatcaactttcccttcattcgcaaagtcaattgaatatcgaaatgtttggaggaggagcatcatcaggttttggaggatttggttctagtactacaaccaacaattcaccatttggaggcggagccggagccggagccgctacaactaacactggggcatcaccatttggatcaactaatacaaacacaacaggtggtggtatctttggtagcaacgccaattcctcaacagggtttggttcatccaatgcatttggtgctagctctaatacaaatactacaccggcatttggaggtaatactggaggtggactctttggttccacggccaacgggaccggttcatctccgtttggtcagcaacaacaacaacaacaacaaccacagcaaactacatctgcgtttgggtcttccaacaattcaggatctgtttttgggtcatcagctactggaggtggtttatttggtagcaagccagctacgtcaacttttggtggtttcgggtccactactgcaaatgcatcttcaccttttggagcatctaccacaaatgcttttggtggtggcgcaagtgtcgacccaaatgtcaataatggtacagctgcaaagcaatttactccattcacagaaaaggattcggctaacatgactaacgttttccaaaacatttgttgcatgccggaatataaaaatttctcttttgaagaattgagattgaaagattacgaacaaggaagaaggttcccaccagcaggtgctactgctaatgccggctttggtggcgctgcaggcactaatgctacaggaggggggtttgggtttagtggtgctgctactggtgcctcaccttttggaagtggcactgctggagcagcaaacccttcaggctcagcttttgggtctgcttttggatcaacttttggcaacaagccagctgggacctctccatttggggctgcttctacaacaggtgcatttggaggtacaaatcagaaccagtcaccttttggttccaatacagcaggaacttttggttcgggtgcatccaatacttttggaggtggtgctaacagcacttttggtaaaccagctacaggatttggttcttctggtggggcatttggtggcaatacgaacactggaggagcaggtggtggtttatttgggtcgagcggtaatgcttttggtggtcaaagctcatcgggatttggtgctgccaataatagttccccatttggtcaggcccaatcaaacaacgcatttggtggtgcaaacaataattcaccatttggtcaaagcaatacgcaacaacagtcaggggggttatttggaagtgggactggtaatgcatttggttcaaatactggcggatctacttttggttcaaacaatacgggatttggagctggtggtaatgctttcggtcaacaaggaaataccgggtttggtgctaacaaaccagtaactacaggatttggatcatctacatcaggaggtttatttggacaacaaagtcaacaacagcaaccaggcgctacaggaggtttatttggacaaaatcagcagcaacagcaaaatgcaggaggtggattgttcggtgctaagcctgctggtggttcagtgtttggacaaagtaataccaacgcgtcaggtggaggtttattcggtggtcaacagaacaccccaactactggtggggggttatttgggtcaaaacctgccgcttcgggtgggttatttggtggtcaacaatcaggacaagcacaacaaggaggagggttgtttggtcaacaaaatcaacaaaatacatcgggaggtggattgtttggaaacaagcctactggtccaaccacgacaaatggtggtgggttgtttggtaataaaccggcaacagggggcggattgtttggtggtcaacaacaacaaacccagcaacaacaacaaccgcaaccatctcaattagggggcggcttatttggagccaaacctggaacaactgcttcactgggtggtgggttatttggtggccaacaacaaacttctaatgttggaggtggcttgtttggaggtggtgcagcatcgacaggtgggttatttggagccaagacaaatgccaacgcaacctctaattccacttcgacgggaggattatttggaggtgcaacaacagtacaacaacagccacaacaagctcaacaagcattggctagcatcaattctcaaaatccttatggtaacaacccacttttccaatccataacaggaacatcatcacaacaacaacagcagcagcaacaacaacaacaaacaaacaatctcccacagttttcgttggttaaatctgcggcacctattaagaaggcagttactctaggaagtacttcgcaaaaggttactccgttgttcaaggtgagttcattaccaacaaaaacctcgacagaattggtaaaggaagatacagtcaagaataagaaaacagatgatttgttttcagccgctactgaccaggcaatcatatcttctgatattttcagaccaaaggaaagttttaaaagtttggttttggataaatcgaaggcttctaatgcgttattaacagagctgtcatcaggaccaacgaaacaggtaacatttgttttagataaatcagaatcgaaagaattatctgcatctacaccagaacctttagataaagacgagaaaagtaaattggaattgcaaggagagcaacaaaaacagcagcaaggtcaagatcaagattctgatgttgacagtgaagggtattggatgtcaccttcgcttcaggaattgaaaaagaaatcactccttgaattgaaatctattcctaaatttaagattggtagaaaacattatggtgaattagaatttcttgaaccggtagatttaacttctattgtcaatttagatgacattgctggaaatttggttacgttttccaacaagacttgtgttgtataccccgacgataataagcctaagccaggagaaggattgaatttaccagcacgaatcacattagaaggatgttatccaataaataaagctgataaattgccaatattagatcctaaaagtgaaattgttaaacgtcatattgagaatttaaaaacgataccagagatgaaatttattagctacgatcctacaaatggtcattggacgtttgaagtacaggaaatggattaa

SEQ ID NO: 6180 - DNA, 846 bp, Candida albicans
atgtctgatttaggttttgatccaagtttgaagaagaagaaaaagtccaagaaggttgcttctgtggtggacgacacagattccaaggaatcaacaccacaaccaggtgatgcatcggttgatgatttgttttctgggttaaagaaaaagaagaagtcgtcgtctaagaagtcagcagaagaatcagggtcgccgtcagtagatgaagacttatcatcgtcattgggcgatttaactttaaagaagaaaaagaaaaagagtactaaaagcttggatctcaatgagttcgagcaacaattagaagaagcaggtgtggaagacattacagaatctaccaatggtgccacaaatgatcaatcagcaattggattatcttatcctgacttgttgtcacgtttctttgatattttgaagaagaacaaccctgaattggctggtgacagatctggtccaaaattccgtattcctccaccaatagtccaaagagaaggttccaaaaagacattgtttgccaacgttcaagaaattgctaccgttttacagagaagtccagaacatttaatccaatatttgtttgcagaattgggtactactggttccattgatggtgaaaagagattgatattaaagggtaaattccaaccaaaacaaatggaatctgttttgagaagatacattattgaatatgtcacttgtaagacatgtaagagtatgaataccgagttgaagagagaaagtgccaaccgtttacatttcttgagttgtaaggcatgtggttctacgagatccgtgtcttcgatcaagactgggttccaagcccaaatcgggaagagaaagaagttctaa

SEQ ID NO: 6181 - DNA, 1608 bp, Candida albicans
atgtctcagtcattgataattttcaagccatctggtaaggtggaatatcaacttaataacaagattcatccattcaatgagttcatttcttcaatagtcaacgagacttacaccaccatatcattaaatttcaccacaaagacattaaacaacagacggttttactgttacaataaagacaacatttatgttgctctatattttgacagcataactactatagataatgatcaaattaagcaaactttagcagggattttaaagactttcaacaagttggaaccagagtctgatggtgaaaagttgaaaaaattagtggacttgcaattcaataatttgatgaagttgaaacaacaagaaaaagttcaggaacccactattgctagtcctgcaaggagtgggtccagtactcctaaaaatattgagcctaaacaaccaacaaactcaaagaagatgagaaaatgggataatggggaaatagtagaggcaaatgacgggaaggctttggattactctggaaatcaggatgctgtgggtagtgaatcgttaccggaattaaagattgacaagtcagcatttaccaaggagcgagatttggtgcttgtgaatgagttgaacgatattcttaatgagtcggatgatgaaggtgaacaggtagatgaaactaatggatctgtgggcagtggcttcttttctaaaataagctcatatttgggtggaactatcaatgtcgatgaggtttctaagaaattccgtgaacaattgataacgaaaaacatcactccggggatagcaacgacaattattgacaaaatcaaaaccaaattatcttcaaataaaaaagtcacaatggcggtctacaagcaagcactcacagacgaattaaccaagatattgacgccaaatgtttctacagacttgttgcatgatataaagagaaatgccgagcttaacactaggccgtacgttatatccgttgtcggagttaacggtgttggtaagtcaacaaatttggccaaacttgccttttggtttttacaacacaatttgaacgtattaatttgtgcttgtgatactttcagatcaggtgctgtggagcaattgaaagtccatgtaaccaatttgaatcgtttaaatgaggcttcaacaaatacaaagtcgagaattgacatttttgagaaaggatacggaagtggggatcatgtggttcaaactgcaaaacaggctgtacaatacgcagaggagaacaagtttgatatagttttgatagatacggctggtagaacccattcaaatgccaagttgatggccccattgaagaaatttggggatgcagcaaatcctaacaagattattatggttggtgaagctttggtaggtacagattctgttgaacaagccacaaactttaataaagcctttggtaataaacgaactttggattttttcattatttccaaagttgacaccgtaggtgatttagtcggtacaatgataaatatggtcatggcaacaaatgttcctattttgtttgtcggtactggtcagacgtatactgacattaaaaggttgagtgtgaagcaagtagtagagatgttgatgaagtga

SEQ ID NO: 6182 - DNA, 2199 bp, Candida albicans
atgtctgaaacatttccagaaactaacactcctgtacaaactccatctactgaaagttttgttaacaagatgaatgctggcgacaaaactattggcaataatattttctctcaagatagtgatagtaaccaacaaagttcacatcaagaaccgctttcgcctcctaatccatctcctactcccgagaaaagacaattagacgatgaggtggataatagtatcgagccagagagtaagaaacaaaaggtggaagaagaaactgaggccagtcaaaccggggtcatccaaactgaggtcagcgaaactgtgcctgaaattgaatcgtcagtaaataaagatctggaacctgttaatggtgtatcggaagagtcagagaataccaataatgagcaagagaagccacaagaagaggcgccagaagagaacccccaagaagaagtgccagaagcaaagcctcaagaggaagcactgggagagaacccccaagaaataccaaatgacaaaccacaagatgacgagccagatattcaagaggtggacccgcctaaaccagttgttccagtctttacagaacctgctcccaaaccaccacaagaaccagatatgaacaatttaccagagaatccaataccacaacaccaagccaaatttgttttaaacaccatcaaagcggtaaagagaaatagagaagcagttccattcttgcatcccgtggacactgtcaaattaaatgtcccattctattacaattacattccaagaccaatggatttgtccactattgaacgcaagatcaatttaaaggcatacgaagatgtttcgcaagttgttgatgactttaaccttatggtgaagaattgtaagaaattcaatggagaagcagctggtatctcgaaaatggcaacgaatattcaagcacaatttgagaagcttatggtcaaagtgccaccaaaagagttgccagctggaactaacgttgcagaagcgacatctgttgctacttcacccactacaaacaagagaaagtccgttgcagaatcctcgtctctgcatcagcatcgagattcagtggctgcagccagaccaaagagaactatccatccacccaaatccaaagaattgccatacgaaacgaaaccaaagaacaagaaagttgcagcagaattaagattttgtaaccaaacaattaaagaactcatgtccaaaaaacactacaattataatttcccatttttggcaccagtggatacagtagctttgaacatacctaactataatgaaatagtgaagcaaccaatggatttaggaactattcagtccaagttagccaacaatgagtatgaaaatgctgatgattttgaaaaagatgtgagattagtgtttaaaaactgctatcttttcaatcctgaaggcactgatgttaatatgatgggacaccgattggaagctgtttttgacaagaaatgggccaacaaaccagttcctgaaccaacccctcaaaactcagatgtcagtgatagagagtacagtagtgaagaggaagataatgtagaaattagcgaagcaatgctttcagaaattccagcaatccaagtgatggagaatcaaataatcagaatgagaaaagagttggacgaattgaagaaagagcatttgaagaagttaagagaacagcaagctgccagaaagaagaagaaacaacaaaagggtaagcgaagagcacctaaggcaaaacacacaaaggacactcaacatcaagtgcaagcaccaccagaaccaccaaaattgacaccacctcaaccagtagtcacttatgaaatgaaaaagcaagtttcagaaatggttcctaatttatcagacaagaaattaaatgctttaatcaagattattcaggatgacgttcaaatcagtaacgatgatgaagtagaattggatatggatcaattggaagatcgtacagtattaaaattgtacgactttttgtttggtgacaaagcattgaagaattctgctggtaagaagaagaaacctgttgccaataacaatttggacgaattggcacatttaagaagtcaacttgcattgtttgatgaaggggtcaatggtcagcaagggtccgacaatggatttatgaaagtggttaaccaagaagagtcttctgaagatgaagcatcgtctgaaagttcagaagaagagtaa

SEQ ID NO: 6183 - DNA, 762 bp, Candida albicans
atgggagttattgaaatcgagtcagaacaacagttcactgaattaaccaaagccgatccatccaagttgattgcactttatttccatacaccatgggcaggaccttgtaaaaccatgaatcaagtattcaaaaccttagctgattccaaagaatcagataattcaataatctttttaagtataaatgctgatgagttaccggaaatcagtgaaatctttgaagttagtgcagttccttatttcatattgattcgtaatcaaaccatattgaaagaattatcaggagctgatcctaaagaatttattcaagcattaaaccaattttccaataacaccaacagcactactaccagtaataacgataacgtccaggcatcaattaacagcacaactgccaataccaatagtaataataccaccactaatgctcctgaagtggaggaatcagaggaagcattaaatgaacgattaaataaattaactaaagctgctccaatcatgttgtttatgaaaggttcaccatcttcaccacaatgtggattttctcgtcaattagtggcaattttaagagaacatcaagttagatttggatttttcgatattttaaaagatgattcagtaagacaaggtttaaaaaaattcagtgattggccaactttccctcaattatacattaatggtgaattccaaggtggattggatatcatcaaagaaagtattgaagatgatgagaaattcttcgaacatgctttagaagcttga

SEQ ID NO: 6184 - DNA, 1554 bp, Candida albicans
atgaaaaattttaatgccttatcaagattatcaatcttgtcaaaacaattatcgttcaataatactaacagttctattgctagaggtgatatcggtttaattggtttagccgttatgggtcaaaacttgattcttaacatggccgaccatggttacactgttgttgcttacaacagaaccactgccaaagttgatcgtttcttagaaaacgaagctaaaggtaaatccatcctcggtgctcactccatcaaggaattggttgatcaattaaagagaccaagaagaattatgcttttggtcaaagctggtgctccagttgatgaattcattaaccaattattgccatacttggaagaaggtgatatcatcattgacggtggtaactcccatttcccagattctaacagaagatacgaagaattggccaagaaaggtattttgtttgttggttccggtgtttctggtggtgaagaaggtgctagaactggtccatctttgatgccaggtggtaacgaaaaagcttggccacacattaaagacatcttccaagatgttgccgccaagagtgatggtgaaccatgttgtgactgggttggtgatgccggtgctggtcattacgtcaagatggtccacaatggtattgaatatggtgatatgcaattgatttgtgaagcttacgatcttatgaagagagttggtaaatttgaagacaaagaaattggtgacgtgtttgccacatggaacaaaggtgttttggattctttcttgattgaaatcaccagagacattttatactacaatgacccaactgacggtaaaccattggttgaaaaaatcttggatactgctggtcaaaaaggtactggtaaatggactgctgtcaatgcccttgatttgggtatcccagttactttgattggtgaagctgtcttttctagatgtctttctgccatgaaagccgaaagagttgaagcctctaaagccttgaaaggtccacaagttactggtgaatctccaattactgacaaaaaacaatttattgatgatttagaacaagctttgtatgcttccaagattatctcctacacccaaggtttcatgttgatgaaccaagctgctaaggattacggctggaaattgaacaatgctggtattgccttgatgtggagaggtggttgtattatcagatcagttttcttggctgaaattactgctgcttacagaaagaaaccagacttggaaaacttgttgctttacccattctttaacgacgctatcactaaagctcaatctggatggagagcttctgttggtaaggctattcaatatggtattccaactccagctttctctactgctttggctttctacgatggtttaagatctgaaagattaccagctaacttgttacaagctcaaagagattactttggtgctcatactttcaaggtcttgccaggtcaagaaaatgaattgttgaagaaagatgaatggattcacattaactggactggtagaggtggtgatgtttcttcaactacttacgatgcttag

SEQ ID NO: 6185 - DNA, 1137 bp, Candida albicans
atgtcgtcctttggaacattatttaaagttactacatatggggaatcacactgtaaatcagttgggtgtattgttgatgggtgtccaccagggatgtcattaactgaagcagatattcaaccacaattgactcgtagacgtccaggtcaaagtaaattatctaccccaagagatgaaaaagatttagttgaaatacaaagtggaactgagaatggattaactttgggttcacctattggaatgattgtgagaaataaagatcatcgtcctggtgattacagtgagaccgatttgtatccaagaccaagtcatgccgattggacctatatacagaaatacggaaccaaatctagttctggtggtggtagatcatctgctagagaaactattggtagagttgccgcaggagccattgcagaaaagattttggccaaagtgaataatgttgaaattgttgcctttgtaagtgctattggtgaaatatctatgagtaaatctcctcaagatgcaaaattccaagaacttttaaacactatcactagagaacaagtcgatggtgtaggtccaataagatgtccagatgcaaatgtccgtgaagaaatggttaaagtgattgaaaaatatcgtgatgctaaagattccattggtggtgttgtcacttgtgttatcagaaattgtccaattggattaggtgaaccatgtttcgataaattggaagctaaattggctcatgccatgttatcattacccgctaccaaagggtttgaatttggttctggatttgaaggtatcaagatccctggttcaaaacataacgatgcattctattatgatgaaaatttcggaagattaagaactgaaacaaacaatagtggtggtatccaaggaggaatctcaaacggtgaaaacatttatttctcagttgccttcaaatcggctgctactatcagtcaagaacaagaaactgccacttatgatggtaaaagtggtgttttggctgctagaggtagacacgatccaagtgtcaccccaagagcagttccaattgtcgaagccatgactgcattagtgttatgtgacgaatatatgattcaacaagctagaacttcaactagattattggtgcaagacaattaa

SEQ ID NO: 6186 - DNA, 2304 bp, Candida albicans
atggttcaatcttccgtcttaggtttcccacgtattggtggtcaaagagaattaaaaaaaatcactgaggcctactggtccggtaaagctactgttgaagaattgttagctaaaggtaaagaattgagagagcacaattggaaattacaacaaaaagctggtgttgatatcattccatctaatgatttctcctactatgatcaagttttagatctttctttgttgttcaatgctatcccagaaagatacaccaaatttgatttggctccaattgatgttttgtttgccatgggtagaggtttacaaaagaaagccactgaaactcaagctgctgttgatgttactgctttggaaatggttaaatggtttgattctaactaccattatgtcagaccaaccttttctcactctactgaattcaaattgaacactgctgctggtatcaaaccagttgatgaattcaacgaagctaaagctttgggtgttcaaaccagaccagtcatcttgggtccagtttcttacttgtatttaggtaaagctgacaaagattcccttgatttggaaccaatttccttgttaccaaagatcttgccagtttacaaggaattgttgcaaaaattgaaggaagctggtgctgaacaagttcaaattgatgaaccagttttggttttggacttgccagaagctgttcaatccaaattcaaagaagcttacgacgctttggttggtgctgatgtcccagaattgatcttgactacctactttggtgatgtcagaccaaacttgaaagccattgaaaacttgccagttgctggtttccactttgatttcgtcagagttccagaacaattggacgaagttgcttctatcttgaaagatggtcaaactttgtctgctggtgttgtcgatggtagaaacatttggaagactgatttcgccaaggcttccgctgttgtccaaaaagctattgaaaaagttggtaaagataaggttgttgttgctacttcatcttcattgttgcacactccagttgatttggaatctgaaactaaattagacgctgttatcaaggactggttttcctttgctactcaaaaattggatgaagttgttgtcattgccaagaatgtttctggtgaagatgtttctaaacaattagaagccaatgctgcttccatcaaagctagatccgaatcttctatcaccaacgatccaaaggttcaagaaagattaactaccattaacgaagctttggctaccagaaaagccgctttcccagaaagattaactgaacaaaaggctaaatacaacttgccattgttcccaaccaccaccatcggttctttcccacaaaccaaagacattagaatcaacagaaacaaatttgctaaaggccaaattactgctgaagaatacgaagcttttatcaataaagaaattgaaactgttgttagattccaagaagaaattggtttggatgttttagtccatggtgaaccagaaagaaacgatatggttcaatactttggtgaacaattgaatggttttgctttcaccactaacggttgggtccaatcttatggttctagatatgtcagaccaccaattattgttggtgatgtttccagaccaaaagctatgactgttaaagaatctgtctatgctcaatctattacttctaaaccaatgaagggtatgttgactggtccagtcaccattttgagatggtcattcccaagagatgatgtttctggtaaaatccaagctttgcaattgggtttggctttaagagatgaagttaacgacttggaaggtgctggtattactgttatccaagttgatgaaccagctatcagagaaggtttgccattgagagccggtaaagaaagatccgactatttgaactgggctgctcaatcatttagagttgccacttctggtgttgaaaactctactcaaatccactcccacttctgttactccgatttggatccaaaccatattaaagctttggatgctgatgttgtttccattgaattctccaagaaggatgatccaaactatattcaagaattctctgaatatcctaatcacattggtttaggtttattcgatatccactctccaagaattccatctaaacaagaatttgtttccagaattgaagaaatcttgaaggtttacccagcttctaaattctgggtcaacccagattgtggtttgaaaactagaggctggccagaagttaaggaatcattgaccaatatggttgaagctgccaaagaattcagagctaaatactaa

SEQ ID NO: 6187 - DNA, 1362 bp, Candida albicans
atgattcctataagatcttcaataactagaatactaccgaacggtttttcatccaaacttttcctacgtcagttaaataaaaaatcaaagccaaatccacataagaataaaaattttgattcattcaatgaagtatttattcataaaactttactatcatctattaatcaacataatgacactgattatgttcgatgttcaatattcaatgccaatggtgatatgattcaacatggtaaagaaatcttgaaaagtcaatttataaaacgatataatttaacaccaagagattttaggaaattcaattggcaaagatcagcaacaggaacaacaacttcttcttcttcatcatcttcatcagcgggacaaacatcatctgggacatccaaatcatcaagcttatcttcactgtcttcatctccacattctacaatatcagcattatcattaagtaattcttcccttggatcatcaactaacgttgatattgtccccaatattactattcgacgtaacagtatactagtacaattattaaacattcgagctttaattaatcatgatcaactaatcattttcgataattcatcaagtttccaaaattcccatgtttcttcttatacccacctgcaatttcttaaagatttaagtcaacgattaaaatctacaaatttggatggattaccatttgaattcaaagctcttgaaggaatattgatttacattgtttcgaatttaaatatggaaatgaaagttcataatactgtgttacaaaatattattactggtttagaagatagtattgatcgaaataaattacggtatttgttaattgaactgaaaaaaattcatcaattccatcggaaaattaccttaattaagaattgtttagaagatttattggaaaatgatgatgaattaaatgatttatatattactgaaaaattcaatagtgaaggtgatggacaaccacgacaggggacaaatcatgaagaaattgaaatgttattagaaaattattatcaaaccattgatgaaattgttcaaattgtggaaaatttgaaaaatcaaattaaaactactgaagatttaattaatgtggttttggattctaatagaaatcaattaatgctattaggattgaaattttctacaggattgttatcgatgggggtagcattatatgtgtcagcattatatggaatgaatttagagaatttcatagaagaaatagatggtggttttgaagttgttacagtggtttctacaattgctttgattgcattacttttattcagtgtcaaacaattgaaaaaagttgaaaaagtaaccatgacaagtttaaatgatcaacggaaataa

SEQ ID NO: 6188 - DNA, 1770 bp, Candida albicans
atgggtagcatatttaaagatggccgtagaatattagtcagaccaaaatctttaataatctgcttatgtttaatttcaataattttcactcaactcattaggtatcaataccaacttatagctgacgaggttcaaccaactattaatgaagaccattcatcgtcacagtcactaaagaacaccaaactaaattcaacgagaagctcgtcaccaatatctccaccaaaatccttaaataagctaacatcacaagagttttgggagcacatattcaatatttttgagatcaacaaattcgacgatggattaaagccattaatcaaatacacaccaaaggaacaacaactaaccaccaagataaagactcgggactggttattatcaaaagctaacatattccacaaggatataatcagacagtaccatgaatcagtattgcgcaatttacccagcaagttacctaagtcagtttacactccaaacacctatggtattgtcactattggaggcaatttctattcgtggatggcttatattcagctattacagctacgtaaattaggatctaatttacccgtggagatactcattccatccatcgaggattattataaagaagcgcatttttgcgatcatgttttacctcaatataatgcaaagtgtattctagtgccggagaaattggggtttaatgttgccaagcactggaaattttctagctaccaattcaaagctttggcactttgtttaagctcgtttcaacatgttttgatattggattccgataacgtcgtcctactgaaaccggaaaaagttttcgattctcctgtttaccgtgacaatggtatggttttatggccagattattgggaaagaacaatatccccggaatggtacgacatcattggcaaacctgtagtaggtaataagcaagtgagaactggccgttttcctgttaatatacacaatatgttaaccagcgagcttgagattaatgaaactagattccacgatcttgaaggtgctttacctgatttgtcgactgagtctggtcaagttatgtttaataaaaagactcacgggaaagtcatgttgatgactttgtattataatatttttggtcccgagatttattataaactatttagcttgggagcattgggtgaaggtgataaagatacttttgctgctgcggctcttgcttgtggagagaaatactatcaagtggcatcatctattaggacattgggatactttgacactactcctggtggtggattccatggaatggccatggcacaaaaaaatcctcaattggattatcagctatttcagaaaactaatcaaaatttcaaagatttgcatttggattgggataatgaagctaaagatcaattcagtgccaacaataaaatccctattttcactatgcattgtaatattaaaaagattaacccagcagcatatatgaaagatgaaaaaattgctaatatggatgaaaaaagaatgaatgtcagattttattcaaatttgaaatttaagttgaatgatgatgatatctatagtcctgataatgaaaaagagaaaaacaaatctgaaaaaacagataatgaccccaatgagattgattttgaattatcgagatggcagattgtttctgagattctttgtgaccaaaaaataacatttcaattcttgaaagatgacaatatggatgaagtgtgtcaatttgttaaaaataccattgcatggttagggaaaaagacataa

SEQ ID NO: 6189 - DNA, 2889 bp, Candida albicans
atgagatcttctggctatttaaattccaacaatggatcatcgtcatctttggaatcgactaatgtaaacaaatcaaccgataaaaatcagttgtatctcaaagttgtttgcaattgtgctacagatttagtaccacaagatactacaggaactggcagtgagtccaaaaaagcttattcttccagcaaatcaataaatccagttttggttgtccaattaaacaataccatcaaatcaacctccaagaaattaaataccaatcaacccagttggaatgacgagctttatatgccattaaagaaccaagacgattcatctttactaatattctctgtgtgggataagcatacaagatacaaaaactatttaggtgaattgagattaaacgtaaaggatattttcgtcgataatggtaattttgtcgacaagacagaattgaaatggtaccacttgaattccaacaccaaatatcattcatttgtcacgggttcaattttagctggttttgaattggtaatcaagaataagaagaagcgattccacagctcctataacgataaattccagcaattatctatagattcagatgttgagtctgcatttaaaaaatggttatccagtttgactaaaccaacaatttattctgtgaataacaaaataaatcccaatgatcaaggtttttatgatgatgaattggtcaatgaattcgagctagaatctgttttgacagagagatccaagaaaagccatttgaatgttccaggaggaaatggtctattgtcggttcctggtgatgattgccatgatgccggttccttttcagatgcatcgtttctttcagatggtggatatgcaagtgatgcgtctgctaacttgtttgaccaaaaagagacatcgtcagatctgaagaaatcaagaataaagtctaaaatgagacttcgtagatcaaaacaagaatatgaaaatttcgagttggcaagtcgccaggtacttggtgttgtatttattgaaattgtctcgtgtgaagatttaccaccttacaaaaattttactcgtacatcttttgatatggatccctttgtggttgttagttttggtaagaaaacttttagaactggctggaaaagacatactttgaatccggtttttaacgaaagattagcttttgaattgcttcctcatgaaagtaatttcagtattcagtttttagtacttgataaagatcatttctcgtttcatgataatgtggctcatatttctttgccgttgagaacattaactgagtatgcaacagcaaaaccaactgaaggtgacagttctgatgtcaataccagcgatagtactagttttagtcaaacaggaaatggttttacaactgaggatacagaattcccagaaaatgattcggtacaaattattgaaaacgagactccaagcaacaaacaaagtcgtaaaagatacttatctcggaaaaaggttgttggaacacaattagatttgaagaaatttaaagccatgtctttaagtttacagttgcatgatcaaaaatatattggtaaatatgcacccaagttaaaaattagagttaggtttgaaacttatacagaattgcgtaagaaattttggagagttttattagaagaaagtaattcgaccccagaaaatcgcgacagttgcgattacattgaattaatttctttattagatacattgggatgtgttaatagtgatgaattggtggaattattttattccaatttggggaaactgtcttggggaggtgatttattaacttttgatgaaatcattgatcaaatggaaacctacgtcaatcaaaatgttgagagtggtaaagttaaaatatttgaatttgaaaagtgtccaatttgtaatgaaaaaagagtttctaagaagcaagatctagacataattactcattttgctatatgtgctagtaaggattggagtgtggttggtaaattacttctgtcgtcgtatgttacacctactcaggctacgaaaaaatggtttaccaaggcattgattaagttgacgtatgggaaatacaaactaggtgggaattcagccaatattttggttcaggatagaatgacaggaattatagtagaagaaaaaatgagtgtttatgtgagattgggtataagattattgtataagggtttagataaagctagatctaaaagagtgagaattttattgaaaaatatgtcaatcaaacagggtaaaaaatttgatgcaccacaactgaaatcagatatagcttcatttattaagtttcataaacttgaccttgacgaatgtgaaatagatgacccatcgcaatttgctacgtttaatgactttttctatcgaaaactaaaaccgggtgctagagaaatagaggatgaaaaaaattccaaaattgttactagtccggcagattgtcggtcggtggtttttgaatcaattgataaggcaacacagttgtggataaaaggtgcagggtttactatacccaaattgattcataatgatcatctgatgcgtgtatcttcctatacattgggtattttccgattagccccacaagattatcatcggttccattcaccagtcgatggagttattgaaagtattaaacatattgatggtgagtattataccgttaacccaatggcgattcgatcggaattggatgtatttggggagaatgtcaggaccattgttacaatcaaaacaaaagattttggaaatatatactttattgctgttggtgctatgatggttggatcgattgttcttacacaaagatacaggatacgagatttcgaaaggcgaagaattgggttacttcaaatttggagggtctactgttttattattaattga

SEQ ID NO: 6190 - DNA, 1080 bp, Candida albicans
atgacaatcaccggtaaagcaacaacatacagtgcaccaggttcagatttacctaatgttcttcaacaaaccacatttgtgattgatgaagctgctattcaacccaatgatgttgttgtgaagactttagcaaccccaattaatcctagtgatgttgcacaaatttttggcggatataacgatgcagttccaagcactcgtttaggtagtgacactacccctcaacctttaagtgtcggtggtaatgaaggagttttcaaagtgattcaaattggtagtaatgtcaagaattatgaagttggcgatgttgtcattcctaaattaccagggtttggtacttggagaactcatgctgtggtagatattactcaagatagtgatttgaccccatttatcaaagtcaatgatttgactattgatcaagcagcaacaatttctattaatccatcaactgcataccaattgttgcatcaattcgtcaaagattggaaatctggtgattggattattcaaaatgctgggaattctcaagccagtaaatatttgactcaattggctaaattgattaatgttaatgttctttcgattgttcgtgatggtaaacctcaagaattatacgatgaattatatgaattgggtgccaccaaagttttatcggaatcggaatttttgcatcctgagttcaatatcgaagatgtcaccaaaggagaaggtaatgtaagattggcattgaatagtattggtggggaaactgtaggtggattggtcaaaggtctttctcgaaatggagttttggcaacctatggtgttcttggtggtggaaaaatctcttatgatggtcgtattcaattgttcaagaatatatctaccagagcttattggttgacagctaacaccaaggccaatccacaatcgaaagttgatactgtggaagccgtttctaaattatttaaagaaggtaaacttaaggttgctgcttataataaagtgaaatttgattctacaggtgatttgaaagctacaatccttaacacaattggtaagtcaaagtcaggtaaacaagtggttatctatgagtaa

SEQ ID NO: 6191 - DNA, 654 bp, Candida albicans
atgtctaaaatcaccagttctggcgttagagaaaacgtccacaaattattggaatactccactgaaaccaaaaagagaaactttttggaaaccgttgaattacaagttggtttgaaaaactatgatcctcaaagagacaagcgtttctctggtactttgaaattacctcaagttccgagaccaaacatgaccatctgtatttttggtgatgcttttgacgttgatagagccaagtctttgggtgttgatgctatgtccgttgatgacttgaaaaaattgaacaaaaacaagaaattgattaaaaaattggctaagaaatacaacgctttcattgcttctgaagttttgatcaaacaaattccaagattattgggtccaactttatctaaagctggtaagttcccaactccagtttctcacaatgatgatttatacagtaaagttactgatgttaaatccactatcaaattccaattgaaaaaagtcttgtgtttggccgttgctgttggtaacgttgatatggaagaagatgtcttggttaaccaaatcatgatggctgctaacttcttggtttctttgttgaaaaagaactggcaaaatgttggttccttggttattaaatctaccatgggtccatcatttagaatctactaa

SEQ ID NO: 6192 - DNA, 2775 bp, Candida albicans
atgataaaacacgttgaaataattcaccgagtacggtattcaacggcctctaccattgctaaaaaaatccaattctctaaattggatgaaaaatggaaagcaaaatggaaatcacaatcaccaactggttccctacatccaacaaaacatctaataccagaaacaaatgaaaaattttactcgttagcaatgttcccatacccttctggtgtacttcatattggtcatcttcgagtatataccatcagcgatgtagtggcacgatataaacgatccaaaggttttaatgttattcatcctatgggatgggatgcctttggattacctgcagaaaatgctgctgtagaaagaaatatcaatccttcagaatggactgagacaaatattgctaaaatgaaaaatcaaatggagacttttttagccgatttcgattggcaacgtgaagtgaataccagttcaccagaatattataaatggactcaaaagatattcttaatgttgtttgaacgaggattggcatataggaaagcagcagaaataaactgggatcctgttgataacaccgtccttgctaatgaacaagtagatgctgaaggaagatcatggagaagtggagccattgttgaaaaacggaatttagaacaatggtttattggaatcactaaatacgctaaagaattgaatcgtgatttgaagaacttacctgattggcccgaaaaagttaaaactatgcaaaagaattggattggcgaatctaatggggttgagattaatattccagtgaacttccctgggttagaacatgtaacggtattcacttctcgtccagatacattatttagtatgcaatttgtagcattggcattgaatcatcccatcgtggaagcagcagcaagggaagatcaagaattagcagcatttattgaatctgccaaatcaatcgatgatccaacatcgaaagcaggttacatgttgaaaaatataaaggcatctattccaatcgatgttgataacaatattaagaaatcatttgatataccagtttttactgcaccatatgtgttagggaactatggacatggggcagttatgggatgtcccggacatgatgaaagagattttgatttttggaaattgaatggtccaaggggtgtaccggcaattcaaatcattactcccaaaaaacaaaatgcaaaagacgattatccatatactttgaaaaagggcacattagaggactcatcagtattaactcatggattgaatgatattggagaatataagggtaaaacaattgaaaaagcgacccaaatgattactgactgtttaaagtcccattcattaggtgattatactacacactttaaaatcagagattggcttatcagtagacaaagatactggggtgccccgattccaattgttcattgtcacgattgtggacccgtggcagtcccagataaagatttacccgtaatgttgccaggtgtcaagggtaaaaattttggcaaggggaacccattagggaatattgaagaatttgtcaactgtaaatgtccatcttgtggcaaagatgctagaagagaaactgatacaatggatacatttatggattcctcgtggtactttttccgatacttggattcaaagaatgaaaatttacctattggacctgaagccagtaaacaaatgccagtagacttatatgtgggaggcgttgaacatgcaattttgcatttattgtattctagatttattgctaaattccttagtgattgtggattgtgggatggtgagcctcatcacaaggaacctttcaagaagttagtcactcaaggaatggttcatggtaaaacatttagtgatcctataactgggaaattcttaatacctgacgaacttgattttactgatcctgccaatccacttatcaaaaccactggtaagacacctgtagttacttttgaaaaaatgtcaaaatctaagcataatggcgctgatcctggtgaatttattgaaaggtatggtgctgatgtcatcagagcccatttgttattcctggctccagtttccgacaccctcaattggcaagaagaacagatttccggtacagatagatggttgagacgtgtgattcaattgggtgattccataactgaaattccaaaagatcaattcaagactgaagcttcaggttcactgcagactttccaaaatgttaccttaaacaaagtacactatgattctattgaattcaacagtcaagaactcgaactttataatactatacaaggctacgttcaatctattgcttcctctattgaagttaagttttcactcaataccattgtgtcagatttgatgaagatgacaaatactataagtgaagccattaaaactaccaacacttacaatcaagatttgattttcgatagctatcaaaaattattgatttgtatgtctccagttacacctgcaactgctgaagaatgttgggaaagatttgcccttaaccaaggaaaaccagcaccaaaatccatattctatgaaaaatttccaactgatgttcctattgaatccaatttgaccatgtataatatatttataaatggtaaacatagaggaacaatggaagcacctaaatcatttgccaaagaatctgaaactgaaatcgtgaaacaaatctcaggtgctgaaaagttcaatgatctcataactggtcctgttaaaaaagtgattgcaaaacctagtatgataagtatagtctttaaatag

SEQ ID NO: 6193 - DNA, 1530 bp, Candida albicans
atggatcaacaagaagcacccatatattatggcagatccgtaaataaggtctacaaccaggaatttatcattgatagtcgattcaaaatagtcaaggagttgggccatggtgcctatggtattgtgtgttcagcaaaatacgataatgggtccaaaaaggttcctgattcaaacaacggtaatgcctcatcttcagctaatgcatcgtttgtggcaatcaaaaagatcactaatattttcagcaaaaacatcttatgtaaacgtgctttgcgtgaattgaagttgttgcagttcttcaggggccataaaaatataacatgtttatatgatttggacattatccccaatcccatgacaggcgagtttaatgaaatatatttatacgaagaattaatggaatgtgacatgcaccaaatcattagatctggacaaccattgtccgatcagcactaccagtcgtttatttatcaggtattgtgtggattgaacttcatccattcggctgatgtgttgcatcgtgatttgaaaccaggtaacttacttgtcaatgccgactgtgagcttaaaatttgtgactttggtttagcaagagggttttctgagaaccccgacgaaaatgctgggtttatgacagagtatgttgccaccagatggtacagggcaccagaaattatgttgagtttcaccaactacactaaggcaatcgacatctggtctgttggttgtatattggcagaacttttggggggcaagccacttttccgtggcaaagattacgtagatcaacttaatcagattttaatgatattaggtaccccaccagaatccacgttacaaagaatagggtcccacagagcccagaactatgtcagatctttgccgattacgagaaaagctagctacgaagaacttttccctgacgccaacccgttggcgttggatttattggaaagaatgttgactttagacccacgtgagagaattacagttcgagatgcattgaatcataagtacttagagctttggcatgatcctaaagaagaaattgagtgccaagtcaaatttgatttcaagtcgtttgagactgtagatgggttggacgaaatgaaacagttgatcatggatgaagttcagaagtttcgtgaatttgtgaggaagccaattgaggaacagcagcgaatacaaatgcagctacatatgcaaaaacgtgaagaacagcgacaagaggaggaagagaaagagctactagaacagcaaagacagtttccagctcaagagagtatggatatttctcagaccccttacaataacttggaaacgaatataggtactcctcaggttgaagatgattatcccagaccacaagagttggatgagtttactttttcaaatttggaatcttcaagctccatgaatttgttccaagacatggctaaaccatcaggagaagagtatataaagctagaggaagagcttgggtttggattagatggtgctatgtttaacaactactgtaacgaccaccagtag

SEQ ID NO: 6194 - DNA, 1992 bp, Candida albicans
atgattttagaaagcatgggcttgcattacctatattacctagttatgatagcaaccaaaagtttgtcggacaattacccactgataccattgaggaaggaaagaaaaggtgcccttaatcaatgggttcaaattgttgaagatttgattgtattacaagcaactgttgcagttgcagcaaatttcacccaaatggttttgcctaaaacagaaaagggaaaagggattttcaaattgaaaaaaccttttaaaaatgagaaaccggcagagaaatatattgacttgtacccaattcaaatgtcttctgtggcacaacttgacaatggtcaatcggtaatgtcaactaactttgacacttatactttgattttacaattagggtacatcctatcaactgttgatgaatgggaaatcaacaactacagagtacgtgttattgtttttgtcgagtttctgaatgaagtcgctgatgaaaaggaaagattagctggattgttatcaagtttgagaattgatgcagaaattagggtcatttgtttggaaaatgcaaatttagattcttataattatatgatcaaagggtacacgaaatcacagctgaataagactcagtatgataaagttgacagagtcttggcatgtgatcaatggtggaagaacttgtcgaaagcaagagaaacattacgtgaaattgaaaaaaggaaaactttaggtaaacaaaaattgagaattataccaacaagaacagactcaaattcatcactccttccagagacattccaaccattgaatttaacttccagaagtccacaaggggttcaagttcaaggcttgaagaataatagaagatatacactttccaatttacaagaacaagggatgtcattatcatttaatttgagagctgccaatctgacgacaggaaaagatttactatatgctgattcaatagttgatagtagtgacagtgaatcagaagactcgtcatcagttgccacttcaaacactactgccaatcttggctatgtgtcgtctagagataatagttatgtcaatcttgcttcctcgcaagctacattagaaaacacgcaaaggggagatcttcctaaagtcaaaaatacgttaaaagagcaaaatgtgtattcaagaacccatacaccagagatattatccagtagatcttctgtcatcaatttgagaccaaatttcctgtctgttaaaatcccaactgcaaaaattaatgacgaagctgaagatggggatgaccaagaggaggatgaagaggaagagggagctgaaacagataacgttcaaggcaaagaagaggatgaaacaaataaagaaactgccgaaaagggaagtattctcatcaaggataaacagtccaagacaaaagatagatctaaacaatcgattcaatttgttgcagatgaacctccaaaggatttactggtaaatcctgaatcatcacaaagtaaccagaaaggtggtaaacccaaaaccaaaaatcttattgtcaacgatgatgaaataatccatcatatggaaacgccacaatttttagctgccgaagatgatgatgagacagatttcctacaaatgtcattgagagacagtaaatttccttcatgtggtccatcaagtgctagatctgaagtgtataaacagaaaccaactttgtcaacaaatcaaagcgccgattctgagagaactataactagaaaacaattacaagaagaattgaagaacttaacattcaatgatatccctgcaaagggacaacatttggttttgaatgagttaatgagtagaaattcgccatctgataaaacccacattatttttagtacattacctgctccatcaaacggtactcatttaaacgatactgattcctttgattacactaacaatttggctatttggttagatgatttaccaccaattttgttagtcaattcgcaaaccgtaactgttacaactgcattataa

SEQ ID NO: 6195 - DNA, 2775 bp, Candida albicans
atgtctttttggccatttacaaactctatgaatagcaataatgcattgctgaaatttttagattcggcacaagatctatcatcaatcactgctgaagatctaataggagatccaacattactggaagaacttttaaatgaacttcataatattaaaggaaattataactcaagaaacggcgtagctagttttctgtttctgcaaccgcaaacaatcaatgaagccacagtctcaaactcggattcagcatcatttacatcgtctagtaatgatatcaacactggcaacacaaaggatagcaggggaaggaagcttctagaaatattgattcaaccacatatattatctgggttgatagagtatgtggaaaaaagtgttgattttttttacgaacaaagtattaaagaaaatgaaaaagttttggatttactcaatgagaatccacctgagacagatatacaggaggaagaagaacttaaaaagattagacaaaaaaacggtatcaagagtgacgacgatgatgacgatgacatcgaagatgatgagaatgaggaagaagaatcagaggatagcaagtttcgcagatgtgttcaagcggcagcagatatactatcaattgatttgtggattattctgaatcgaattatcgagactgaaagccttataaataaactatggcgcattattgatttaaataatttactggaaagttctcccagtgtctcatatttggtacacattttagatcaattgatggatgctaacagtattgaacttttaaacttttttagaagacagaaaaatcttgttgatacatttttatcaaaaattgaggtccccatattaatggatttcttttttcgtcttatacaaacagataaacaggattcaccaacagggataattgatactattgctctgcaaaatatcatttcaaaactaattgaaatcttaaaaccagaaacctcacaatttgcttcacaaaactgcatccctaatcatcaattattctttaaacaaacagcagctacggattttttaaaggccttagttaatatatcttcaaatgcagcattagcttcagtggtggaaacaaatatcggaccaaatcaattgacacgagaattagtttcaccaactgtcatcaatacaatgattaatgatattatgttagtcaagataagtgatgaaaacgggaaaacccaaacaaacaagcacggaatcaataatgttgttagtataattattgaactcattcggaaaaataactccgactatgatcttaattgtgggacttatagttctatgttacaaaatggagacgggggtccaatagaagtcaattcttatgttatgtatcaatggctcaaagattttgaacaaaacccaccgggaccgcgagatcccatctatttgggcgaaatgttggatttgttttcatcaaatttagatagaattgccgcattaatacaaacggaacctattccaccaccacatgtcacttccaatattttggggttcacaagatttaagttatctgaattgattgccgagttgttacattgttcaaacatgatattactcaattccagaaaaataaagaaaattattcaagttagagatcaaatcagatctcaacaggagaaaagattacagaaagcgttgcaagagcagattctgttttccgattctcccaacatcaatcaagtgactactggtttagacgatgtatcattagatgacatacattttgctagtcactctaacgatgaagttcatgattatggcaaacttcttgataatttagaccaagaggaagattcagaagatgatgaaccttctatttcacctgagaacccgtttgtatgttctgaaagagacaaatctatgagacaagatccttgtgtgggcgattatttcaaaatcaaattgcttgatctgggaatcctatatgatataatcagcatgttcaccaaatttccatggaacaactttttccataatgtcgtgtttgatttaattcagcaaattttcaacggaaaactcaattcatacaattcatttttaatagtggagcttttcaaagaggatcaatgtaatttaaccgatattgtggttagcagttacaaagaagacacaaatcctagacctggttatatgggccatttaattctaatcagtgaagaaattgtcaaatttacatctctttataaacctgatttgatatctccagtgatagtttctgcagtccaatcagaaaaatggacctggttcattaatgatgttcttttgaaaactagagaaatatataatgtggttttaggtgctgaggactctgatggaaataacgattatgggtttgatacttcatctgttggctatttggatatggatcaacccaaaaaaattatattgggagatgcatctaatcatgatgagtttataaatgataatctgggtaatcaaaataatggtggtgtctcagaactggaacaagaacaaacactgaatgatttgaatgaccttggtgatgattatgacatgaaccaattttttgtccctgatatcaatgtactgaaaatgtcacccagtggtgatttaacaaaacataatattgaagatgattgcgatgacgatctagatgaacaccatgatgattctagtgataaatatttggaaaatttatcagatagctcatctgaagatgaagatgaagacgaagacattggagaaactaacaaattaaaaagagtacccacacataatgatgattga

SEQ ID NO: 6196 - DNA, 1089 bp, Candida albicans
atgactttaacgactcccgaattaaatttcaaagcttatacttataaaaacagcagtactcctgttcaattgactgataaatcaattaaattagtcaaagatccctcaaatcctgactcctatgttgccccaccaggtaaaatcttgcttaaaattaactatacttcattaaacccagttgatgttaaattacaccatcttgccactagtttagtttcattattagtcaacaacaacaatggatttggtagagatttcagtggtgaagttctttctattggtgataatgtgaaaactaatgttaaagttggtgatttggttcaagggatttatcataaagtttattcccaaggtactgcatcacagtatcttttagttgatccaaatgaagttgatatgattgccaaaccagataatatttctttggctgaagcttccagttggccaactgtgtttggaactgctttattaatgtccaaagatttaaaatataaagatagtaaagttttagttattggtggaggtacttcagtcgggagatatcttgttcaacttgctaaacaaggtggtgctaaagaagttgttgttacttgttcaccaagaactgaagatgttattaaatccttgggggctgatactattattgattacactaaacataaaaacattctttatcctgttttagaatcagttaaatcaactgggaaatttgattatatattggattcttatggaggtcacgagttattcccagaaattaataatattttgactgaaaaaatcggtcgttattatagtattgttggtgattatccaggatctagcttttataatttgatttcaactgtatcaaaagttgcatggagacaacttcttggtgctcttggattgttatcattcaattataaatttataatgttagataatttcaaagaaagtatgcaagaagcaagagatttgatcggtagtggcaacttgaaaatctttgttgatagcatttacccatttaatcaattggatcaagccatcgagaagttagattctggtaaagctgccggtaaagttgttattgaagttgctaaagaataa

SEQ ID NO: 6197 - DNA, 672 bp, Candida albicans
atggaaatcgatgctgaattgttaacccaacaagcttctgattctgcccacactgacactgctactgctgcagtggctgctgttaataacgaacaaggcaaagaattagaacaaaccgaatccagtactaatcaaacatctgcattggacaaagatgataaggagacgaaggataatttgaaccctagagaggaaactcaatcttctcatcaagaaatcgacattccaaaggatcaacttacgaatcaacaaaaccttgctgatcaacatcaacagtatcagtaccatcaacagcttgctcaaacaaacttcaaaaccgaacccactaattcagccaaacctccacacggatcagaggaatggcatagacaaagaagagaaaatcataaggaagttgaaagaaaaagaagagaatccataaatactggtataagagaattggccagattgataccaactaccgataccaataaagcccagattttacaaagagcagttgaatacattaaaagattgaaagaaaatgaaaacaataatattgaaaaatggactttggaaaaattgttaactgaacaagctgttagtgaattgagtgcttcaaatgagaaattgaaacatgaattagaatcagcttatcgtgaaatcgaacaattgaagagagggaagaaataa

SEQ ID NO: 6198 - DNA, 4905 bp, Candida albicans
atgtctaatgttcagctgttgattggagacctcaatggactattaacggattccaaaagaaggtttcctgatattagactgtcatgtgaggctgcaattaaagtactaaaaagttattcactagtagtcccaattcaagagattaataaagaggatcacaaagaggaaatattgaaaccgtttattttatcttgtaaatcaggaaacatcaaattgactaatatttcaataccagtgattcacaaattaatattggctcatttgattcctgaactggatattactcaggttttactatgtttactggaagcttctaatttagctgttgacattcaattgagaatcttacaatgtttaccggcattgatgcaaaaatatccaataacgggaacaaatttacttgacatgttagccatatgttctagtttgacagcgaataataaatcctcaatggtggtaaatactgcttcagcaacattgcaacaattgtttacaaatatatatgatagtattggtgaaagttctaatgaaaagaagaaagagcatgaagtggtgatagataatgatgaaaccgtgaagttagattcattgtcgcatgaagggtttttaatatttcaggatttatgcaactttattgataatgaatcacccacttatttgaaagactctatacacataaaattatattcagtgcttgaaattgtggagagcattgttcatgggcatcaagttttatttcaaactcataaggaattgacttacttgttgcgagtacgacttttcccatcaatgttgaaaatcttaaattctgtcacaaaaaacttcccattagtgaatagaacaataagaattatgaatgttctattatcaacccaattagaaaacctcaagatagagagtgaaattgtcttgtcctttttctgtcatttgttaattgatggaggagaaacggaggaaagcgaatctaattgggaaaagtacatggttcttgaactactcaaaaatttgtttagtgattttctggtacttaaattaatttttcaacaatttgattataataagctgatgaagaatgtattgaaagaattattcagtgtgtttatggtatatttacaaaaaagcaacaccattgttgatgacattgtcagaccagtttcaagattggctccaggtaccttttcaactgatggatctagttctagtggttctgctttacatggctccaacggcaattacttatcgcgtacaacttcaaatttgaaaccactggtccttgatcatttggataaattagaaccacctggcaatattccatctacgtatgggatttatttgatttatcaaatattaatacttttttctgatggtgtggctaattttgtttataatttgaacgatgaatctaaagatccaattagtttagaagctgatgtcgaattagcaaatgcattgatcgaaggttgtggtgttgatgttagtttattatacgagaatttcatttacacgtcaatggatgatgatagttttaatatattgattaagtcgtttcaaaaattcacccatgccactggcttattaggaataacagccaccagggatcgtttgttagtgattttggcaaaggcaatcattaagaataccagtaaaaatgataccaatgaaataaattcacaatcgcattcatcggggtcaatgttgcaagaacagaaaaaacatttgttagcatttggtggatctttggttgaatccataagcacgtcaattgctggagaagggagtaatgaaacaaatcaagcgaatacttctagtacttcctctactagatcgacaccggtggctgcaccacatagtgcattaacttcaaggtattttaattcacgtcatgttgtttgtcttcgagtattggttaacactgcaatatctttaaaatctacattacaagactcttggaatattatttggattgcccttcaatggtgtgggtattatctcgatggacctgatcagtttagtccatatttcaacaacaccaaggtacagcaaacattaaaggaatcaaagaaaccacaaatcagtgcacaagatgtgacaaatgtggaaaactccataaagaaattatatgtaagcattggtgatagttcagttgaaacgtttagaaccatactcatcaccttaactagattatccgattttgctttggatgttgataatgagaaatatgaagatgaattacctatatccagttttaacaagagttattttgtttcaaggttggctcaagttagtgaaatcgatgaatttcataattggttaattaaagatgaggaatcatgggacatcattagttcgtatttcattgatttgggaacgaaaagaaatattcatttcagtttaagaaattatgttgttgaaatgtatatgaaggttattgagactgtggcagtttttggatttcaacatgatgatttgattgaagaaacttctcaaaaaacattgaatgggttgaatggatatttggaaaaattatttggcatgggatcgtcgaaagaattattaatcaataatcgtgaaacagaaatccatcttttgattcttaccacattgcatacattgattgacaagtatgataaaaattatcaacaaacatggaatgaagtatttaaacttttgaatacgcctttccgtacagtaaagaaagatgaagtagaggaaactatcaataatgatgataccagatctgatgaaggggttttactcaaggataaaactcagcttttggttgaaaaatcatttgacactttaaaattaattctcgatgaatttttgtctactctcccatttaatcaatttaaattgttaattgatacattgtccaactttgtttatcaacaatatgatttgaatatatcatttagttcagttagttatttttggttgattagtgattcattaaaatcaagaatggtatcattcaaatgtgagacagtcctgaaatcacatgataagcaaactgaaatacatggtgatgaaaacaaacttcttgaacttatcagtggagaaaaaattgaaagttataatttttacatttatttaaacatttatttattattaagtttggcgaaaatatctaaacatgaaattaatagagcacaagtaagagatggtgctattcaaacattttatcaaatcatagatgttcatgggaatgtgttgaagaataaatcttgggatatgatttatgatattgttcttttacccaattttttcactattgttcctgaatcaagaggtaaagattggttagatagtttacaattgattttcacaggattaattagtctttacaacaaatttggtttgaacgacgataatggtaatggcattgttgtgaaatggcaatatttgattgattattttgataaattattgaaattacaatggattgatttaaacttgaaaatttttaaatcattacaagatttaatgacttcctatggagggagtaagaacataaataagcaagtgggtgatttgtttttcaagatttggtcacaattcccaattgagtacgatttgattaataacaattatcaagagtctttggttcaatacatgcaatgcttcctacctttatataagataacatcaaaagatttgtcaatttcagatatggatttaataatcaatattttcaacaaatgtggaatgtaccccgtattaccaagtaatcaatctgataatgcaaaaccaaccaatttgcaaaattctattttgcagaatttgaaacttttgagtaatgttgacaacaatattaatttgcgtccagaatttgaacctttggtgatacaacaattgagtaatattattatttatccctatggaattagaaatagaattgaaaccaaattacaaaacaatgagattgtcaagaataaattacctacatttgttgcatttagtcatttgagtttgaatttattaaatgaaaatttgaacaactttgatggggttttctcgagtattggaaacgataatgccataatgaaatgtttgaaatcattacttgaaattattgaaaataagtcaattggaataaataattccgggaaagaacaatcattatcatcactctggattgaaagtgatcttatatttgttaaaattatcaagaaattgatcaatcatcgtgacaataacaatttattaactaatgatgaattttggaaattaattattcaaagaattgaaattagttttattgcgtatgatgaaaaaaaccaagaaatcaatattactcaataccacgaattgatagaattagtattaccagaattgttgaaatatgaaaacagccagcacatgattgaagatttggtgattaaactttatgaaaattcatatttgtataaatttaacgatttagaaattagattaatggatcaagagaaatatactgttgacaaaacgattgataatttgacattatataaatttgatgaatttttcggtacgactgaatctattgaaaaatatccaaatttacgaatcagattaaattgtctagaagaattgataaattttctgcttggaaaagataccaatactgattcacaaaaaattgttttgaaacaattgtgtgaaaagtatttgattttgagagctagttttacatttagaagaattttgaatgatatcaaattagtatataaatgtccaattccaattgttcaacagaaagaattgttaatgatattgaacgggttgaatgaattgtcagtgaaaaataacaataatgatgatttgaagaaattatcacgtttgttgattcaattaattccttattcatcaagaattaataatttagacaaagtattgcctcaagtgttgatcaaaatctcactgtaa

SEQ ID NO: 6199 - DNA, 1380 bp, Candida albicans
atggacaaagacgttttaacttggaaaaatattgaaattaatccaagtgatatttatcctgaatttgatggtaatttagagacagtggctactgtgattgacacatcattattcttgtgttatttttattgcaagccgatgttgttgggtccattattaagattaccaaataattactgtgattccaaaatagtgaatgagtgtttattgagcaatatccataaccatgttcaacaacgcaactccaaacagcctaattttatcaaggaattgcttgatttttattatacaagaagcttacatgaagaagccttggaaatgttgtacaaattggctcatgatgaaggtacgattgagcactcaaacgaagatgacaataaatttgatgattttataaaaggacctgatttgactatccagtatttacgaaaattgacggacgacaatttgtatttggtattgaaatattcaagttgggtgattgaccaagacaaaaacgctgcccgcccaattttcatgaatgactcgtatgaatgtgaaagctacgataacactaaagtattacaatttctatgcaaaaaggatcaagatttgggaattatgtatttggagtggttactttttgctagtgatatttctgagagtttgaaaaaatcaaaattgtacctgcaacttgagacaaagttgtgtttattgtatttgaagcaattgaagagtgggaagcatcaaaacgattattacaataaattattagagattttaaaaacatctcaaacttttgaaccatggctgattttgaaggaaatgccaaccactcaagataagtttttaagattgactatttacatatacaagaagttgggggagcatgaaaaatcgattgatgttttatttaaccaattgaatgatttggacgctgcaatggaatactgtctcgagatatataacagacaacagagctcgtctttgggatcgagtttattttataaactattagaggacttgttgatgaattatcatgaaaactgtgaattaatcgtgagattattatcagaacacggtgccaagattccaatcttaaagacattatctgtgctacccaggtcgtttccaatgcataagctaaagacatttttcacaatagaaattaaaaacaccgatgaacaagtcaaagatagccatttggtgtcacaattatacaaggttgggtcaactaatctacagtataaagtaatgactcttcagaatgagggatataaaattggttctagtaaacaaccttgtgcaatatgtaacaaacgattgggatacagtgttttcacaataaccaaagaccatgaagtagttcactatggatgtgctcaaagtcgaaaaaaataa

SEQ ID NO: 6200 - DNA, 1242 bp, Candida albicans
atgtcaaattctaacccattaaaagattcattagtatttcaaccaattaaagttggtgataataccctttccaacagaattgtttattgtccaaccacaagattcagagctgcaaaagggaatgaagaaccaacatatcgtcatgtccctctggatttaatgcttaaatattattctgatcgtgctcaatatccaggaactttacttgttactgaagccacattaatttctaatcgggctggtggttatgatggatgtccgaaaatttccactcaagaagaaactaaagcttggaaaaaaattgttgatgctgttcattcaaagggatcatttttatcttgtcaattttggtttttaggtagagttggatatccaagtttattaaaacatcgtaaattggattatttggcaccatcaccaatttatgaaaatgaaaaacatcaaaaacaggcagaaaaagccggattaccattacgtgaagttactgaacaagaaattcatgatattatttataatgattatactattgctgctaaaaatgctattgctgcgggatttgatttcattgaattacatggagctcatggttattttattgatcaattcttacatgaatgttctaatcaaagaaccgataaatatggtggtagtattgaaaatagatgtagatttgtgttggaattgattgatcatttgatcacaattgttggtgctcatagattagcaattagattatcaccatgggctgaagttcaagggattgttgaaaaagaaagtcccatccccacattttcttatttgattaatgaattacaaaaacgtgctgaccaaggaaatcaattggcttatttatctgttgttgaaccaagagttcaaggcaccatcacggctgatattaaaaccatgaaaggtgataatgaatttgtggctgaaatttggaaaggtgtattacttagagctggtaattatacttatgatgctccagaatttaaaggaattgttgctgatacttctaataatagaactttggttggattttcaagatttttcatttctaatcctgatttggttctgaaattgaaaaataatccaagttcattagtgaaatatgatcgaaaattgttttatgaacaatttaattggggttataatacttatggacaagatcaacctgttgatgaagaaaaagaaagaaaaaaatttcctaaagtcattggcaatatcgatgaagctagattgtag

SEQ ID NO: 6201 - DNA, 1122 bp, Candida albicans
atgactactccatttgttgaattacaaactccgaagaatctagatataatttcagatgtatgttttatggacaatactgatcaacatcggttattggtaagcaattggaatagtgagattttactattttcatgtgattcgttactccatgaacatcaacccccacatttacaaccaatcaatacatttactactccggacattccattatgtttattatatgacaacaaacagaacgtgtcacctcttgttggattgttggatggatcaatacgagaattggattttgaaaatggtaaattaggcgataatattggtgatgccgttgatgacaataatgaaattgatagcgggatcaataatttaaaaaatgtcaatattagtgggcaaaatagtagtagcattgtcgcttcatcattcaatggtaaattgcaacttattgatacccgtcagtctcaaagacaacaacagaaattaagtccacaaactttccataatcaacggaaaatattcactatggacaccagcgatcaatatttgatattgggtttacaaaataatatcattgaaatttatgatttcaagaatttacaccatccattggaaacaagacaagttggattaaaatatcaaattaaagatttgaaaactttcccggataatcaaggatttgctttgtctactattgacggtcgtgtatcaatggaatatttcaatcctgatcctcaatttcaattacaaaatcgatttacattcaaatgccatcgtcaccctgatcctaaccctgaatcagcaggtgatttagtgtatccggtaaactccttggactttaatcataaatatggaactttatttacggcaggatctgatgggtatgtatgtttatgggattgtaaaaagaggaaacgaatgagacaatatccaagatttttatcagcggaaaatgaaccggaaagtatcgttaaattgaaaatcaatcgtcaagataatttaatggtagtggctactagtgatgataattataaacgaagacgtagattaagtgaaagtgaaaattccaaaactcctagtcgtgtatatgttaaacaattggcagaaaatgaatgtaaaccaaagtcatag

SEQ ID NO: 6202 - DNA, 1281 bp, Candida albicans
atgaataaaggtactttattagaattgggtttattaccgatcattacttcagcatttatttggcaaattgctgctggattaagattaattaatgttaatttcaaattaagaattgatcgtgaattatttcaaactggtcaaaaattaactagttttattttcagtcttattttcgctattggattgatttattcaggatattatgataatgccattagaggttataatccattacaagatggtattccttatggatcttatgctttgattttattacaaattactgcttggtcatggattgtcactttattggtagaaatctttgataaaggttatagttttggatcaggaattttatgtttccttgctattcaatcatcaactaatttcattgctaatttattaggattagaaaatttcccggtggttaattcaaataaatttgaaagttatggagccttgatgaatttaatcaaaaatttttcaattttcaatccaaaacaaactgtttatcaaatttggcattctttctttagaattcaattacctaatttaactcaattttatatttctttggcatcaattttaattgttgttgctttacaaaatttccgcattgaattaccaattagatctactaaagttagaggtatgaataatgttttcccaattagattattatacactggtgggttacctgttttgtttgcctttactgtggttgccaatattcaagtcgttggttatttaattcattcagtattatcgaaacttggtacttctccaattgttatttctatcattggcaattatgtttataatccatcttcaaatgaattagatttaaattcaggtattttgaattattttactagttcatcttcattagttgaatccattatttcaccaattaaaactacagtttattcaatcacaattattgttttagcagtttggtttgctaataaatggagttatatttctggcagttcaccaaaagatatttccaaacaattcaaagatcaaggtatttctctcgctggtaaaagagatatttctatcaccaaagaattatcaagagtcattccagttgcctcagttagtggtgcttttattttgagtgttgttgccttaattggtgatttttttggtggattaggttatggtgttgctagtatcattggtgtaacagcttcttttgctgttttagaagaattcatgactgaatatcaacaaaatggtggtggtcaattcagtaatgcccttgcttcattccaataa

SEQ ID NO: 6203 - DNA, 1134 bp, Candida albicans
atgaagacattattcatttcaacactctccatattgcttgtatcattacttttcacatataaaccactcaccaccaaactaaatctattcactcgtttcatttccatgtctcacactactcacccatatcagaaggaacttgaagttgcaactttggctgtgaagcgtgcctcgttgctcactaaacaattgagtgattccattgtgcagactgccaggtctggtacactaaccaaggatgataaatcgcctgtgactattggagattttgccctgcaagcgatcatcaaccacgctattaaattgaatttccctagcgacgagattgttggtgaagaggattcacaggaattacaggaaaatagcagtttagctgaccaagtattaagtctaatcatcaagatccaacaggaaactagtgtgtacaatgatgttgttggaacattgacagacaagaacaaagtgttccagagcatcgattatggtaactcgcaaggtggactgaaggggagattctgggcattggacccaattgatgggaccaaaggattcctcagaggtgaccaatttgcagtgtgtttggcattgattgaagatgggaaagtggtattaggtgttattggatgtccaaacttactggaaaacattgtatcgaacgaagaacattcaggggttgttggtgggttgtactctgctgtcaaaggagttggctcattctacagtgagttgttcaaagaaggtactgagccattgtcacaacaaaaaccaataaaaatgcaaaaccacacaaaccctagccagttgaaagttgttgaaggtgttgaaaaaggtcattcttcgcattcaacccaagctgaaatcaaagctaaattgggctttgatccaaccactgtggcaaaacaaactgttaacctcgactcacaagtcaaatactgtgtgttggcaagtggacaagcagacatatatctcagattgccagtaagcgatacataccgtgagaaaatctgggaccatgcagccggtaacattttaatatacgaaagtggtggtcaagtaggtgatgttactggtgcaccattgaattttggtaatggcagaacattaaattctaaaggtgtgattgccgcgaaataa

SEQ ID NO: 6204 - DNA, 2667 bp, Candida albicans
atgactttcacaatcaataatacaaattccacagtttttgattcaaccaataacgaaaacatgactatttcggaaccagttcaacctgttctgaaaggaccaaaaggtataaccttttctggagaaacctttattgttcctgaaactcatgatatggtgaaaactttatttgaccccacagttaagaaatcaaattttgaattaattatattgagttgcttattttccaatttgttagtgtttttaatttctaataatcaaattagaatttatatatttattgccttgtatatattttggagattatcttataattttggtattggttggttattacaaaatcaatctaatcataatttgttagtgtcatggtcacaaaaatatcatttatttgaccctgaaaataaaggggctttggctcaatctattcaaaatgaaattaaaagtcaaaggggtgaaaattatgatattaaatccatgccagtggaattcaatacttggttgattttcagaaaatttgttgatttaatattaatgctggattttattacattttgttgtgttgttttttgttcagcaattaaagatgattatcaatttattaataatcaatcatcttggttagtttattcaagaatagtattggggagtggattaattttatttaatttatgggttaaagttaatgctcataacaccatcaaagattatgcttggtattggggtgattttttctttagacaaattaataatgaagaattgatttttgacggagtatttgaaatggttccacatccaatgtattcagtagggtacgttggttattatggatttgctttgattgctaaatcttatgttgtattagccattgctattttcggtcatttcttacaaatgatttttttacattatattgaaaaccctcatattgataaaatttatggtccatccaagaatgaaatcaatttaattaaaattttgaaattaaaagatttgaaaaattttgataatttgaagccattagtaggattaacaaattttaattggatgagagccagtgatattgttaatttagtattgagtttgacttatgggattattatcccattatttgctaattcaattaaactgttatttattttaactgtggggatgaaattatttgagtctatttccatcaatttatcattgacattacaaagttatttcaaaattgttactaaatggtcgctttctaatgatatccccgttgagaaatctttcagtaattgggctgttttatacaattcattaatcaatttgacttattcttcattatttggaatgaatttaggttatttccttcaaaagtcgggttcggattctccttctagtggattattattttctgattggttttatttaagagtgtttttagggttattattaatttatactcaattttggatcaatttctccattattgatctgattggttattttggatggttttatggtgattttttcattcctaaatctcaaagttcaattaaaaatataactactgctggggtatatcgttatttgaataatccggaacaaatttttggagtttgtggcgttatgggtatattcttgatttatccaacggttgaaaattttgtttgtgttggattatgggtagttaataattttattagaatcaatttcattgaaaaatctcatatggtgaaattatatggagaacaagaagtcaatagagattctggtgtaactaaaactgttaaaaagcatttacttccagaagttattcaaagaagaatgagcaatgatgaagcgtatactagaattaatggaaccactcacggaagaagaagaagaagtagtaatttgcataggaattcagttgctgattcgttagataatttcattagagatttaagaaattcatcaacaaaattatcccaacaaaaattgattgaattatcacaaaatttatcatttgctaattcagattataaattaactattgatgggttaaaaatgcaatctactgaaagtgatgaattgaaatatacaactattggtaccccagttactgtttcatggacatcaccaacggaaaatcattcagttcgtgattggattggtttatacaaaattgttcaaacatcatattcaagaaataaaactattctttcatcagccggtagatggacttggtgtaaagaacctaaaggatcatttatatttgataaagagaaattattttgggaagaaggagtttatgaatttagatatcatttagatggtaaacatgatgttgcatatatttctgaaccatttgaaattaaaagtattgaattaaaagtgccggaatttaaagaggatgccataaaatttgctgaaaatttgaaattagagatatttgataaagttatcaaacttaccgatattagtgaagcgatttctccaattgcaaatcaatcagataatgttattgaagtttataaattaatcagttctatgatttcaaaatcaacgaaaattaatattacttataaaatattcttaaatcaaggtgatgatgatttattatcaattaaagatgttgctattaaacttattaatattaaacatgtattagaagaattatcatacaatatcactgataaaaaagatgtataa

SEQ ID NO: 6205 - DNA, 1902 bp, Candida albicans
atggaagaaggagaaggactttttgtacaaagtgatgaggaaagtgattatgatgaacccgcaactaaaagagtcaaaatagaagaagattctgatctcgaactaaatgagtctgattgggaagatgtatttcttgataatattgctgaccctgcaccatcggagttttcaatcacgatacaacagaatgatattgatcatcaaagaaaagaaaggataaaacaactaatcagagagaaacaaaaacgtgttagtattcattacttgagtatggtatcttatataatccatgcaaggtttagaaatcagttaatcagatctaaaagagttcaaaagttgcttaagaagttgattccagatcaagttaaaaaaatatataaaaaatttaagaagaatatggatatgcaatctgctgatgaacaattggtatacattctcaagtatttaattaaatggtttcgaaaaaatttcaaacatgattcaaatgggttgagggttttaggttattcgtctgatcctggtaaattccctaataatgcaaagaatatctcaaatgaatccgatttattggcagtaattaaaaagtttcaacataatcgagataccggggcacaaatattcacagcaattttgagtgctttaggttttgaaagtcgtttggtcttttccattcccctattgtcaattaaaaataccaatactcaaccaaaattgaaccatgaaattttaaaggtaaataaagacaatgatttgttatatccttatttttggacagaattaatcaacccgttggatccgtctgaaatcatagttatggaaacccaatgcttttatgaagaagataaaaggctacttagaatcaaacgttatggtggcacattatcacaaagctttactgatcaattttaccccatacaaaatcaactttgccaaatgtcaatgcattatgtgttgagtttaaattcggagaacctaatagttgatgtcagctcgagatatatgaaggatatttcttatagatggtttaatagattagacttgcggacagatttggggaaatctgcgttattgcttcaatctttgttgcgtattttcaacagaatgaaaaactataccaccgatgactataaagaattagacagtctaatgcaaatggcaatgattaattatacgattcctgagacttttactgcaatgaaaaatagtcctaatttcatcactccatcgactcttaggtataacgaagttatcatgccagatactaaacctgttaagcgaataaaaataaataacaaaaaggaaccggtttatttcaaaaatagtttacttgttgggaaatctgaacagcagtggaagtttcttgggcgttcaattaaacctgatcaagcccccataaagctcgctaaggcaactcctcgaaccatatataacaaacgattatacaatcaaaatgaaattaatgatcctagtttgaatcaagtgaagttatacagttttagccaaacatgtccctatattaaattgaaagttactaaaacaacagatggtaagcttattctcccgagaaacaagtatggtaacatagaaatattccgtgaaaatatgattccagatgattgtgtatggttaaaattaacaaacattgaaaatatactaaagaataaagctcaatttgttcctgtcgttaccggatttgctttcaaagctggtcaagctatacctgttaaacaaggggtaattgttttaaaacaagacgaaattcctataaagaaaatttggcttgctggaagaataaaagaacacaaggcacaacttgcacaaagacgtctaaaacttttatatacttggaggtttatttataaacatttacaaattaaaaaacgtcttgacgatcatttataa

SEQ ID NO: 6206 - DNA, 1920 bp, Candida albicans
atgacaaccaaactgcgaaaccaaccattatcattaaatacaaaccaatcaggtactggcgctggcactagtactgattcaatacctgcaggttcacatatcactgacactaatcagtcctttttattaccaggcttagcatctccaccaactatttcaaacactgccatgtttcaaaatccagcaccacatactatcagaaaaatggatttaagtatagaagtaccaccacatcaacttgagaataatgaacaaaataccactcctatcgatatcaacatgaacatgctcaaacattatgaaatattacaactcccaacaccaattttcaacacggggtcatttgctaattataaccaaccattgtcatcattatcatctaactcttcaaatgcatcaatatcaatgtctccaccaacattcagactgatttcccgagtgtgtagtttaaagcaacccaagagatatgtttctgaaccaatacctatttccacttcgaccagtgaaaataaagtcaccacgtctccaattacaccatcatcatcacctccaacattacaacaagaagagattgcaaagaaagaaaaacaaaagatattttattcaaaacgtttagggttgtctttcaattttgttgaagaaattggtaaaggaaatttcagtcatgttgtattagcgaaaaccaatatttataatagtgataacaatggaaacagtgtcaacaataatactaacgataatcaagaagttgtcgacttggcagttgctgtgaaaattatatctgtgccgatggaatcaaaacaacaagttcacaatttcaagtcattcattcgtcgtgaattaaatatcttgtaccatatttcccaccatccttgtatcacttccttgattgattatgacatatccttagacattcctattgaacaaattgaatcagacgtgataattgatgacgatgaattataccagaaaaccccaccacagaatttgagcatgaatccacactccgacgttggtaaatcaagctctcctgatcagtttatatttatgaattattgtaatggggggaacttgcttcatttcttgcaaaaaaacaatagcaaacatcattatcttcataaccatcaccaccatcatcatcaccacaaccatcaacaaggtcaccatgataccatccagtactggcaatttttgaaacgaatagtgtgtgaattgattgtgaccacagcgtttcttcataaaaacttggtaatccatcgtgatctaaaactagaaaatattcttttgttgcatgattttgactctttggcatccttgacgtcttccataccgtttgacaaattattaatgtccaatgctattagcaatttgagtgattttggattgtcgaaaaaattagcaactcaagatcaattgttaagtacaagatgtggatcacaagactacatagcacctgagatattaatgggattaaaatataatggtaaattaacagatacctggtcaattggggttattatttactcaattctagaaaaccgattaccatttgatataccaccaccttcatcaacaacacattataattcatctacatctcctaatagaggatctcctacagtcataaagagaagaagatcgaaaaccaatagtacagcttatagaattgccatgattgattgggaatggtccaaattagacaatgacaatatagaacgttatcaagagagtgtgaaggagaaggaaaatgaaaacgaccccattccatcagaagtgttggttatttggaaacaattgaaatcagttgttgacaccgttttggttagaaaagagaagagaattaatgttgagcaaatgttgcaaatggatgaattcaaatggattaccgattgtttacctgatttcattgttaatgtataa

SEQ ID NO: 6207 - DNA, 3627 bp, Candida albicans
atgtcgtttccacggacacattcaccaagaccatctggttcacgagaacaggaagatctcacactgatgattaaagcttttagagattcaatggaagctaagcttgacttgcattcgcagaagcttactgctttggtagcaaacattcccagaacggacgaagggtttgaagatttatcacaaaggatcactgttcttaaaaatcatcaaaaagcatttttgcccaaacaagaaaaagaaatcggaagtcttctccacagacaaagagaggaagaaggtgatattaaggatttcaaaacagtcgttggtgaagaaaaagaagaattgcaccaggttgaagattgcgttttaaaagatcaagaagaattacgaaacgtcgaaaagaaagttttgaaagaagaagaagatttgcaaaaggtggaagagtcaatggaaaaggaaaaacgagagttacaccaggttgaagactttattttgcaaagagatgagacggtaaagaaacttggagaaagcaatcaatctcaacaggaaccatatacaactgcaacttctggttcggatcagagattcagatctcaacaacctaacattggaaataccttagcgcaggatctagcattaattccaaaattagatctggaaatttgcaaaattgcagtcaaatatccaaaattgtttgaaacaaaattacgaccaccaccacccagagactttcaatataaaattcaactcacagaccacactcaaatttattcaaaaccatataaatgcaatcaagaagaacaagctctcattaaggatttcatcaatgaaaaattagaagcaggcgttttggtaccagctccaattgatgcttggttacacccaatatttccaatcagaaaaaccaatgccaaccaatcctccaccaaaatagcagttgatttaagacgtctcaataaggtcacagtacgaatgtacacttatccaacagacacaaaagacctcttatcctcactaacagattcccactattttagcgctttagacttaaagaatgcgttctatcaggtaagcatacacaaggatagtataaaatattttgggatttcaacatccgaggggaattattgctttacaactttaccgttcggagcaatcaattccccaaccatctttactaactttgtgagacagattttagaggggatcccatgtatatttatatacatggatgatatcctcatccatactaaaaccttacatgaccacatgtcattactcaggagaatcatggagaaactaaatgagcatcagcttcaaatgaattataacaagatgcaattattaacaacaaaaatcaatttcttagggtacagcattcaagcgaacaaaatatcaccagatatttcaaaaattcaagcaatacaaaattgggaattgcccacgaccactactcaaatcagagcatttgtcaatttcagcaaccactttcgcatcttcatcccagaaatagcaaaatttactaatccattaaatgaattattgaagaacaacaatggtaaaaacataaagattgaacacacccaagcatccattgatggttacaaggcattaaaagccgccatcattggattgccgacgcttcaactttacaatccaaaactaccaaccatcattttcacagatgctagccacatggtagtaggaggatatttatgtcaaccaacattcagaaatgacaaagaagtccttgtcccaattgcattttcatcacataaattaacagaaacacaaagcagatatgctgctatggaaaaggaacttttggcaattattgtgatattggaaaaatttagatatcactgcagcaatacggtagagatctatacagatcatcaaagtttggcatcatttttagataagaaaactactccaccaccgagaattgctaggtttttagacttaattggatcattttccccaaaagtgtactatttaagtggaaagaaaaatttcgttgctgatatcattacaagatatcaaactcaaaatattaaggaattggtagatgaagacaagatattaggacagacctttacagtcaagagaaatttgaaacaacaactattaccaagattggaagcaattgaattggaaaatcttaatgaatcacaggttcacaaaattcaaacttcattagaacaacaacaacaacatgatttggaagacaatgatgaagagttacctctccaactgtttaaattaatgaatgatgagttatttgtaatcattaacaatcaacttttaaaataccttccaagactggaatacaatgatatttgtcaaacaatccatgacaaacaccatccatcaactagagtaacagactacttatgcacactcgcatattggcatcctgatcatctattaattgctacaaacataacgagaaagtgtcactattgtcaactaaacacgtcaattcgtgaggccattagaccataccgaccacttgaaccactcaaggcatttagcagatggggaatggactactctggaccatactttaacacagtccaacacaggtacatattagtagccgtggaatatgtcactggtttaactattgcagtaccaacattgcataaagacgcagataacgcaatcagtcttttacaatcaatcattctgatcatgtcagcacctacagaattagttacagatcaaggtaaagaattttcatcacaagctttggctaccctatgtgaccagaataacatacaacaccatattacctccgcccaccacccacgtgggaatggtcgggttgagaaggtgaaccacctattgaagaaaatattgaaagcattaactaacgatacgatgcaagactgggatttaaaactatatgacgctttaagaatctacaatgctacacctacaatttttaactacactccactttatcttgcacttggaattgaaccacaccataatttaaatcaattacaaaaagatttaattgaaaacttgcaaaaagaattgcccccagaggtccaatccacagaagaacacgaagaaaacccaaatgatgaacaacaagaagagggcagagaacaacaaatttcaagagaagaacaacaggacggcagagatcttgtacacttaagaatttacgaattggaagcaattaagaaagctcgcaagttacacacaaatttgaaaacacgaagaaacgcagtccaaaatatgttaaaggaaccatatggcattccagcaccttttacaaaaggacaatgggtatacagaattagagctaaagcacgaaaatatgaaccaaatttcgatggtccatatcaagttcaagaagtattaggtaaaggtgcttataaattgagagacatcactggaagagaaaaaggaatctacaatcaggatcaattgaagttagcatattcagcagacaacgacccaatacaggtttttagttctttcaataaagaatatgatcgagtacaacaaaaattgttagacaaaattcaatcggaaagagatcatcaattaaattgtttgtcagtccaacatttacacagacaaagaaggttactcgatatatccagctgtcttgagcaaattctgcaataa

SEQ ID NO: 6208 - DNA, 1668 bp, Candida albicans
atgcctcgccagcaaataaaaaagcaagaagtagatgaggttgcaatgcaagcagccattgacgatattaaaagtggtaaaatatcttcttttcgaaaggcatcccaaaagtatggtctttgtgcgacaacattaaggaatcgaatgaatggagttccatcaaggagcattgcccatgcaaatgaacaactcttcagtccattacaagaagattcaattgctcaatggattcttgattctgaacgtgaaggaaccccgagaactcgtaaagatgtgattgaatttgctggattaatagctgcgcaagaagataagccaacaatacatgtcagtgataattggtttgaaaggtttaaaaagagacatccggaaattcatacagtcgataaaaaattagtatcgagtcagactatgaaatccactagtcgtaaacaagcagagaaatttttcaagaatttcaagcagttgataaatgaaaacaatattaatcatgataatgtgtttcgagttgattccacaacctatattatgggtaaaggtaatagttcagaaatggttatacctggtgatgacaacaaggtctatgttcaatcatttgaaggctatgatagttgtacagtgattgaggctgtgagtatgacaggtaatgtctcgcccatagggattgttttcagtggagcggatttgaaaacaaaatggattaatgatggtttgccacattggtattatactgcaactactagtggatctgtatcttgtcaaattatgtacagttggttgaatgaagttttcactccatatctagagcaaaagaaatctgaagacgagaaatgtttacttattatggacaaagattatggtactactaatacaagatttcagaattcttgtgaactgagtggtgttgttcccttatatttacccccttgttgtcctcacttattgtccccagttgatattcaaacgcttccgagaatagtatcaccagagtataaatcaaaattacaagaattggataaaaaatttggatttgcaccagttaaacagagatttttcttatcaggatatttcaaggcaagacaacaattgaatatgactccagaagaaattgttgatcgttgggcttttaccgggatgtatccgaataatatccgtaaagttgttagtttatcacaggatgtggttgcaaaactcaagaatggagctgaaaaaacaagaaaaggggaaagaagaagagctgatgccaataagtctgaagagaataagaccttgtcaactaatgacagtgatgacgatgaggttataagtgcagaaatgaccaaatctgaaattattgaaagatcacaaaggaacctagagagacgaaaaaagcaaatagatagattgttagtgcaggttgcagaattggagtttgaaaagaatcgtttaaggctggaaattctattacaacagcaactacaacagggtaatcttactgaagcagaagtagccaagtatttggaagatgaagactttttggagaagtatgccctgggtgaattatttgttgaaaagagaaacaatttacaagacaataacgagaatcatcaacaacaactggagggcgtgttgagtgatgttactaatattacacgtaagaggaaacattccaatgttgatgatagttga

SEQ ID NO: 6209 - DNA, 1026 bp, Candida albicans
atgtcttcatctactacagttttcgtttctggtgcttctggttttattgctcaaactttagtcaaacaattgattgaaaaaggttataaagttgttggtactgttagatccaatgaaaaaggtgattccttgaaggagaacttgaaagctgctaaattgcaatcagaaaatttcacttacgaaattgttaaagatattgctgttaaaggtgcttttgacgatgctttaaagaaacatcctgaagtcactgttttcttacataccgcatctccattccatttcaatgtcactgatattgaaaaagaattattaactccagctgttgaaggtaccaacaatgccttacaagccattaaaactcatggaccacaaattaaacgtgttgttgtcacttcatcatatgctgctgtgggaagatttgctgatttagctgatccatcaatcccagctactgaagaatcttggaatccaatcacctgggaacaatcattatcaaatccacttgctggttatgttggttccaaaaaatttgctgaaaaagctgcttgggattttgttgaaaaggaaaaaccaaatttcactctttctgtgatcaatccagtatatgtatttggtccacaagcttttgaaattaaaaacaaatcccaattgaatacttcctcagaaattattaatggattattaaattctaaaccagattctaaatttgataatttaactggttatttcattgatgttagagatgttgctaaagctcatattgtagcttttgagaaagattcaattcaaggtcaaagattaattttggccgaatctccattttcaactcaaagtattttggatttgattcgaaaagatttcccacaattggattctcaattacctaaaggtgatccatctcaagctgatgcttggaagaaagctgaaagtaagattgagaatgaaaagactagagaattacttggattcaaatttattgatttcaaaaaatccattgacgattcggttgctcaaattattggttaa

SEQ ID NO: 6210 - DNA, 2703 bp, Candida albicans
atggtgatacagaaactgccacaaactgctaatattcaactactagagcagcaaaaggaaaatattcagccattgagtggaggaaggtctgctactaaattaacgaaagcattgtcatcgagacccaattcggctacatcaataaattatcaagagcatagaacaaaattagaaagagaaagagaagagttggaacaaaagcttttagattccgatgaattggatgatccattacaggtttatattgaatatatcaactgggtccattataattttcctcagggtgccaatgctgatagtggtttggtgatattattggagaaatgtacttcgaaattcagagacgtgctgcattacaaaaatgatccaagatatttgaaaatatggctagagtatactaactattcggactcaccgagggatatttatgtatacttggctaaaaaagagattggaaaccagctagcattgtattacgaagaatttgccagatacttggaagcacaaaagaaatatactgatgctaatcagatttatgagttaggaatacaatcaaatgcatttcccttgaaacgtttacaaaagtcttatgagaatttcaaggaaaggcttcaattggaaatgagctcggtttcaacaacttcagatcttgtgcgagaagctttgaaagtgaaaagagggtcaagtgttgagccaggtgcacacgttgatcacggccctatcgcaaaaaagcctagactagaagttttcaaagatgatgacgatcaaaatcaaagtgtgctacatttgatatttggcgcaagtttgaatgatgacataaaattaaactcaacaaaacagagaatcaaagagaatactatatcagcaacagcttggaaaggtcgggtcttgaaacaaaaagttcctactcctccaaattcttcaggtgggaaaatacaagtgtttcgtgatttcgagcctcttgctttccaggccaaaaaactgatttgttacgatgagaagggaagagcgtacactttgattgaaaatccgggaaagaaatcagagcgagtacttgtaaatatggatttaatatatcccgatgagtctcaagagtttagcatgttagaattactcgcaatctctagaagatctgaaaggcaaaaacagcaaaaacagacactaataaaccatcccaccgtagtggatgaagataccagaacaattacattagcattgaacaactccagcaccattaaatcacgtgatatggacccaacaattacaatgaacggtaatttagcatataatgaattgcaaggaatatacaacgagttgggatatggctacaattttgatgatgaagatgagaaagtacaagaaccgacggttacaaattatgatggatatgttacagagacaattaatccaccaacgactaatgccaatctaattccaacacaagtcgattcgcctcaaatcgatcaagtggcaacacctcctactgacagagaagaagagttcgacgatcgtgtgctaagctcgccattcgttgagcagccagtagctaatactcaaccagttgatccatttgatattggtttacaagaaagttttttggataatttatcgatccccatgagcacatattcaggttactacgataaatcaactacaaaagttgaccgcatcaggaaatttagagaaatcactaacaaaaatcaaacaatcaacagaggatcactgctggccataatcgactattgtggtcaagagttatattgtttactacatgaattaggacaaggtggctatgggtttgtatatttgatagaagctggatcaactggaaaactaaaagcattgaaaattgaaactccttcaagtaggtgggaattctatattttgcatcaagttcatcgtcgattaattggtgaagccggttataaacaaagatatttcattcgtgcagaagcattatattacttccaggacgagagttttttaatattggattattgtagccaaagtacattgttggatgttgttaacaattacaagaataaaggctcgtctttagaggagtgtcttgttatatttttcactgtggagttgttaaaagctttagaagcattgcattctgttggtattttacatggggatttgaaagctgataattgcatggtccgttttgaacctataaacgaaagtgattggagtgagagatatgacagaagtggcaaatttggttggtcacataaaagtatcaccttgattgattttggtcgggcagtggatatgactttgttttcactgggtacaaggtttgttagcagttttaaagctgatgaacaagactgtccacaaatgaatgaagggaccccgtggtcttatgaagcggactattatggtctagcaactatcattcatacattgctatttggaagttatattaaaatcaaaaaagacggtagcaaaatcaaactacatgcaaactttaaaagatattggcagcatgagttatggcaagacttgtttgagttgttgttgaacccgtattcttctgctgaagtcaaccatgcgcctcgaacagaatcattggcaacgataagagaacactttgaaaattggttagaaagcaattcaaaaatgaagtatttaaaggggctcataaaaatggtagaaggagaactaaactcgataaatagagctcgggtgaattga

SEQ ID NO: 6211 - DNA, 2256 bp, Candida albicans
atgaaactactaccattaagtttcagtttccttcttttcacatgtacatttgccaaacaactccccgtttttgatggcaaaacttatcaaagttattcacattcacgtaatgtttatgcttgtcgaatgcatattcacaaaactattaaagaatgttctaccactgatatagaggattatggctgtatgtgtaccaataaagatgccatcagtacattcattcaatgttatgcctatttccaaaaaaattctactcaagccattgatttttttgtcaaatattgtgataattatggtaacatcaccaccaacatcgaccaaatcactgatgcttatgaagatttcctcaataatggatcagacacaacaactataacaaacattaataacaataataataccactaacaacactactagcaatcatttggattttgattattcgaaatatgcttatggacttgaagcctcaattgatcaatttttaaccaattggcaaagatcatttttctatgggatggccatgtcttcttattgggggtttgtattattatttggaaccatttctaattggacccaatatttattccctggattaatgacagatcttactggtccattttctaattggtggagaaagaatttaagtttacctgctacatttggcaccaaaaaaactcaagaatatacattttggtttaaatatttacaaggatatataccatcaagattagaatcaattattaatagtgggttttgtttagtggtgattattgttttatcaattaatacttattatagtgttggtaatgaaattattttcactaattatgttgcacaattacgttatcttgctaatagaaccggaatcaattctacaatattaatgccatttcttgttttgtttgctggcagaaataatattttacaatggattacaagatggaattatggagtatttatgatgtttcatcgatttattggtagaatgatatttttatttgttgttttacatgcagtgacgtttagtattgccttgggagtcgattattatccattgatgtctttcccatttatgatttggggaacaatttctactgttgctggtggcataataatggtccaagcaagtctatatgtaagaagaagatggtacgaggtgtttttaggattacacattttattggcattatttttcatgattggtggttgggttcacattaattatttgggttatgaatggtgggtatttgtagctattggattatgggggattgatagatttgttagggttttacgaatgatatcatttggattcccggaagccgatatcactttaatgtcagatgaaactttgaaaatcaagattcctagaccagattattgggaaccaataccgggaggtcatattttcattacatttttaagaaaagattgcttttggcaaagtcatccgtttacatttgccccctcagtcgagaactccaacaccattgttttatataccaaagtcaaacaaggtgtcactcgtaagttatacaattatcttgtcacttgtcctggaagaagagctaaaattaccgttggcgttgaaggtccatacggtgagtgttgtgctgcaggaaaatcacaaacagcagtatttattgctggaggaaatggtgttccagggatgttttctgagatttatgatttggctaaaagaagcacacccgattcacagaaacgattgagattatattggacaattagagaataccgtagtattcattggttatatgaagaattgaacgagttgaaaaaattccataacgtcgaagtcacagtgtttgtaaccaaaccagactccaatacatacatcaatgagttgagttcgagagttatttctggtaaatgtaacagcacagaaaattttgatggggctaccactgccaccactagtttatatgaaaaggtttcatttgatgataaggcaactattgtggtaacaaatagagatataacttccaaatatgatccaaattcagttaaagatgctatcattgcccaattatcccacgtacatttccgtgaaggaagaccaaaaataaataccatcattaaagaggagattgaagatgcacaaggctcaatatgttttgtgacctgtggccatccagcaatggtggatgacatacgtgctgaagtagtggggactattggtaaatataaagaaaaaagaatcgattattatgaacaattgattggctgggcataa

SEQ ID NO: 6212 - DNA, 2115 bp, Candida albicans
atggattcaattttcccttccaaagttgagtacaaacaaattgatacttttattgctttgtgtgacggacttatttatgataccactgttgacgagatcaaagatgttatagctcctgatttcccacaggaaaagcttcaagaatatgtcaaaacatttaccagaccatcgcaaacaccagggtttagagaagctatttacgacaccatcaattccaacaccacaaatgcgtcaagatcattcggtattttatgtaacattttaggatcaaggatattggcacctacattgaccaactcattgactcccattaaagatatgactttgaaagaacgtgaaactttattggcatcatggcgtgactcccccttggcagccaagagaagattgtttagagcaatatgtgccctttctggtacaacaattgttagattggccagtgaattacatcttaaagcaattcatttcccacaaagagatttgcgtgaaactgcttacgaaggtcaagtcatagatccattcaggtacgattttatggagaaaccaagctttgaaggtgcagagatctacttgcctgacattgatgttattatcattgggtctggtgctgggtctggtgttgtggcacacactttggccaacgatggttataaaaccttggttttagaaaaaggaaagtatttcagcgcttctgagcttcagtttgatgaccatactggtgtcaaacaattgtaccaaggtggtggcgcagttgctactttgaatcaacaaatgcttattcttgctggatcaactttcggaggtggtaccacagttaactggtctgcctgtatcaaaaccccattcaaggttcgaaaagaatggtatgacgatttcggagtcgagtttgctgcaactgactcttatgataaggatcaagactatgttttcaaacaaatgggcgcatctactgacggaatcacgcattcgttagccaacgaagttattatggaaggtggtaaaaagttaggttatgcaagcaaagaaatcaaccagaacagtggtggacacccacaccacccttgcggattttgccatttgggatgcaagtatggtatcaaacaaggttccgttgtcaattggtttagagacgcagctgccaatgggtctaagtttatggaacaagtcagagtggtaaaaattcttaacaaaaatggtattgcatacggtgttttgtgtcaggatgttgctactggtgtaaactttaccattactggtcctaaaaagtatgttgtttctgctggttccttgaatactccaacagtattggccaattctggatttaagaacaaaaatatcggtagaaacttgacgttgcatccagtaactactgtttttggtgatttcgggcgagaagtacaagctgaccatttccacaactctattatgacagcagtatgtacccaagttgatgatttggatggcagggcccacggagcaaagatcgagaccattttgaacgccccatttttgcaagctgctttcttaccatggagaggaagcaatgagttcagaagagatttattgcgttacaacaatatggttgccatgttacttatcactcgtgatagcactagtggtaccgtcaagggcgatccatacagaccggatgcattatatgtcgattacactatcaacaaatttgaccgtaatgcacttttgcaagctttgttgatcactgctgatatgttgtatatcgagggtgccaagagaattctcagtccacaatcatgggtgccaatatttgaatcaaatgttcccaaagaccaaagaagtattgatgacaaggattatgttgaatggaggaaaaaagttgctggtattccatttgatcagtatggtgctgcatacggatcggctcatcaaatgtcatcctgtcgtatgagtggtaagggtccaggctacggtgctgttgacactaatggtaaattgtatgaatgttctaatgtttatgtagccgatgccagtgtgttaccaactgcatctggtgcaaacccaatgatttcaacaatgacagttgccagacacattggtttgggcttggctaaagatttgaaaaccaaagcaaaattgtag

SEQ ID NO: 6213 - DNA, 2217 bp, Candida albicans
atgaagttttttcagttaataactttcttgctaacatttgctttaattgaggcttctggccgtaaaccgagaaagtactccaaattggatactgccatgcaagcatgtaacgtttatattggtaaatatggtactgtgtgtgcatccagtgggaaaaaaaagtcgatcaattggaagtgttactgtaatcaagaccctggttttggaacaatatccgattgtttagttcgtggttataataatgatacctcaattattgacaagtttgttgacaaatgtaatatgactgaatcaaaattctataaaaaatacgacagaatccagaaagagtttaaaaccaatggtactcattatgccaataaaacgtcaaagaccaaaacaagttctgctagcaaaaccctgtctacgaaagcatcaggaactgcaagtgtatcctccagcacaggtaaagctagtctgagcacccaaaaggtttcaccaacaccattattgatcaattacaaaacgttcacaccatacaagaatgcatatgccatgtcgtataataactataacatttccatctactatggtgctggtttactaggatattgggctggtatttttgttattgccatattagcaaacttgtttagaaaaatgttccctcgcttaaccaactactgtactggtgcagtttcaaatgctttcaggaaatatattttgttgccagctacttttggcaaaaagaaggcacaaccactttcatttggttttggtggattcttcgatggtcttgtccctactagattagaatcattaattattaccgtgtttgtgttgttaactggattcttgagtgcattacacattcatcacgtcaaagataatccacaatatgctactaagaatgctgaattgggccatttgattgcagacagaaccggtattttatcagcattcttaattccattattaattttatttggtggtagaaacaacttcttgcaatggttgactggctgggattttgcaacttttatcatgtatcacagatggatttctcgtattgatgtgttgttaatcattgtccacgccattacatttaccgtttctgacaaagccactggtaaatataatactcgtatgaaacgtgactttatgatttggggtgttgtcgctaccatttgtgctggtttcatattgtttcaggcaatgttattcttcagaagaagatgctatgaagttttcttctgcattcatattgtcttagttgttttttttgttgttggtgggttccatcatttagacgaccaagggtatggtgactttatgtgggctgctattgcagtctgggtatttgatcgagctgttcgtttgggcagaatatttttctttggagccagaaaggctactgtttccattaaaggtggagaaacattgaagatagaagttcccaaaccaaaatattggaaatcgattgctggtggacatgcattcatccaatttttaagaccaacagtatttttacaaagtcacccattcacttttactactactgaatcagaagataaaattgtattctatgcaaaaatcaagaatggtatcactgaaaacatttccaaatacttgtcacgtttgccaggcaacacagctaccatcagggtgttggtagaaggtccatatggcgagccaagtggagctggtcgtaattgcaaaaacgtcgttttcattgctggtggtaatggtattccaggtatttactctgaatgtgttgatttagccaagaaatcaaagaaccagtcaatcaagttggtttggattataagacactggaagtctttgagttggtttacggaagagttagagtacttgaagaaaacaagtgttcaaaccacagtatatgtcactcaacctcaagattacaatggcatgaaatcttttgaacaagactcaaattctgaaaagaaatcagatgagaaagattcagttgaatcacctcaaaactcttttgtttcaaaaatcaaacaagacttgtcacatgttgagtttatcgaaggacgtccaaacattgttgaacaagttgaacaagaaatcaaggaaacagacggtgcacttgggttcgttacgtgtggacatcctgccatggttgatgaattgaggtctgctgtaaccaagaacttgaatgcatcgaaacatagagttgaattccatgaacaattacaaacatgggcttaa

SEQ ID NO: 6214 - DNA, 2100 bp, Candida albicans
atggactcgccgacgtatgaccccacgacacatctaaataaaatatttagttctcccgatacgttgaatgagctacctcaattgttaaaccatgtgtcgcagtacaagagacagttgacagaggagattaataaatcgacagccaagtatgagagggttgatttgtcggaagatatttcccatcttgccactagcattggcgaaatcaaacgcgattccagtatgaccaaacaatcgatttcccaaatgacaggctcgatacagagattggattgcacaaagaagaatttggttgcgtcgatgaccttgctaaagagattacagatgttggttaatgtgaacaacacgttgagttcgatattgccgagccacgactataaggagatatatcagttgttgggtgttttgaaggagttgctacagtttttccagccgtacaagtcgattgacgagataaaccaaatcaatcttatggttgtccacacccagaacaagttgattgatgatatttttatggattttgaggagtacaagaacaaggatgaagagcagttgttgtttggcgccagaattttggaattgattgatgtaaagtataaggacaagctacttgcgtggttctacaatttacagttgcaagatttgcaggagatttttagtggcgaggctgggtcgttagacaatttgaatcggaggttcatttatttcaaaaacatactcaaacaggttcagcagtataagatttttccgtgggacatttctaatgccataacacaagagttttgccagattactcgacaggatatatcaaagttgttgtacaactccaaaatcgagtcaaagacgcttttggataatttgacgaaaacgttggagtttgaaaagtctttgggtttgcacaacgagatttcgctggtgtttgagccgtacttgtcgatctgggtgcatgagcaggataagtatttgaattcaaagatgttggagttttcggccgtaccgcagttaccgcctgacgtgcccaatattgctgtgtcgtcgaccgagttgtttaagatctttaatcggttattgtcgcacatcactaagcttaccaatggcgataccattgttgatttggcaagggtgtttaacaagtacttgctggagtataatcggaggattttggctcctattttgtcgaccgacgattttggtgctgagtcgttgaaatactttaccatgttgttgaacacaggcgactatattatcaacaatattgaagagcttgccgacaagatccagaaaacgacaacgcacactattgcgccgttcaacaccgacgcgttttaccagttgatcaataagagcatttccagtttattgcttaaaatgtcgattgattataagccgtgctggcgggaattttttaatttggattgggggcagttggattcggtgaacgatatttcgtcgtacatgaacgatttgaagagcaagaccgcagagaacttgagggtgattcttccgctcattatcagggatagctatgtgcgtaattttaacgacaagttggtcgagatgttggtgaccactatagctaacaacctcaagtttgtcaagccaatgactgcgacgagtgttgagcagatacttatggatgtgtcgtcgttgaaggaggatgcgttgaggtttccgttgttttcggttaaagatgtctccaagtcgtaccagaagtttgttaaccaccagtttggggatttgcagagcttgcttaagttgttgatggtgccgtcaattcccgttgaaaatcttattgagagctattttgcgttgattggcgacaagtcggttagcaattttgtcaaggtattgaaattgaagggggtcgacaaggcgcagcaccataagtatgttgacaactttaagttgcaattgagtgtagatgatgggtcggttacaagctgtttgttgttgcagaatttggaggaggaggaagaggcgtcacgtgccgcgaccccggatgtgaagttgaatgaaaaatttgatgtgagcaagataaacgagaattttaaaaattttggtaaatttttccgtaaagatataggtaatgaaagtagttaa

SEQ ID NO: 6215 - DNA, 2112 bp, Candida albicans
atgtcatccaacaattcccgattaacaccagataggacctctgcctccagctccaccaataatgtgtcacacaatctgtcaggtaaaagacgttctctaaatacaattgagtctagtgtgactcgactccttgtatcaaccaaacatttacttgagagtttaactcagtgggcacgcaaagaagcagatgataagtttgtatcagatgcatatgtcaaattgggtaatgatttcagagcagcaataagggcatttagcaataatggcatcgacatttcagatatagggaatgtgccacaagcattgaggattattttggaggctgcattgagtgaagcaccttcacaagaaaacttggacaggttcttacctagcatcaggaatataattgtaacattgttgcaaactttgaaaaccaaacaggcaaaggcgaaggcaatttctcaagaaaagtctactaaagaggaattaccaactgagaatcaacgaccttcatcacttggtgttgaaggacagcaacaacagcagcagcagcagcagcaacaacaacagagaacaggagataatgattccagtgttgagcgaagcgatgctttgtctcagttacagaagggagacgttcttcaacgtcgtgcatcaaagcggtttagtgcttatcagtatgcaaaactaacaaacttcaacaaccctacaactagtgtgcctaagataaaaccaatggagtctccagaagttcggcattcaaagattatggagacagaagaaccaaatgtcacaccaaacaaaggggtagagtcagttcaagaggatggaaatacagaagagtacgttttgctaagaattaatgcaaaaactaagaaagccaaagttagtttaccagtaacatttgcttcattgagactattgtttgtggaaaaatttgcatactccccaggggcgggtaattttccagacatatatattcaggacccacgtagtggtgttctgtacgagctcgaggaacatttgcttcccgatgtcaaatccggcactcttctttgtttaaatgaaacagatgatcaaaataaaagtataaacgaattgaatttacggttggacgacttgactaaaaaaattgatacaatggggagcaccataatagcacaggtgaaagactcagtggcatctgttgaaattccggtacccactgttgctgcttctgcttctgctgttactgctaaaagtgggaacgcaaatgaggcaaataaaatagggcgcaaggatattaccaacctagaaagagatttccgtgccattaaacagttgcataattcgtcatcggaaaatttcaaggagacgatttcgaatattaccgagcagctcagaaaattccaggaaataggtcttgaggtatctcaaaattctaacagagcttatatggagtcctgtaattctaagttgtctgatgactctgatctgttaattaccaaagttgatgatttgcaagatataatggaagaaatgagaaaggatgtggcacaaagaggggtccgtgttagcgacaagcagttgaaacacattctcaaagatattaacttagccaagaaatctcttcatgacatgacattatatatctcgaaggaaagaccggtgtggaagaaaatttgggaggcagaattggacaaggtctgcgaagaacaacaatttttgaacttgcaggatgatttgatccaagatttacaagatgatatcaaaaaaattgaagaaacgtacaatcttattgaacaatgttccattgaacagattaaaggggcatctagcaaaaggaataaaattgttgctaacttgtatatcccagaaccaggtgaaagtttgcacgatttgaaggacgcagtgttgaatgacattgttggactcacaccaaaccatgaaagtcgacttgaagccattgaacgggcagagaaattgagagagaaagaacgagatatgatgaaacttaccaagtttcaagaagagttaggtgattttgttgaggataagaaattgaaaaaatcagggggtattgaagagatagagaagcagcgacaattgagagatatcgagaatttaaaaagctcgtttgggggtatatga

SEQ ID NO: 6216 - DNA, 2625 bp, Candida albicans
atgggagattttccaaatctagaacctgacaagagaattgatcaaaattcacattccgatactaacagtgtgaatgatcaagctagttcaacaaatgattctgtgttgtcaaccagtccttctcgtttagtttatattccaggagagtcctcgttaactcgtgatggacctttaccgctagatggagaagaaggttcaagttcacaacgtgggttcataactcgcagcaaccgtcaacaagtcgatacatcgttgcaacaagtgcagtacaacaacaacaaaatagcattagacagttctatcaatcagaccattgatttaatttctgaattacaagatgaaaacaaagagagacctatattttatcctacagaaatcgaagatgatgccagtgttgtcttaaactcggcaaaagcacatttggcattagttcgtaaaaatagcacattaaagtcaataagtaaatccaaaattgaaaccgacgaaaaagaactaccagaattcaagattttgaaaatcagtttaaagtcgggacacggcgacaatagcaacaccatggcaaatttggataaaaagtcgattgccaatttgttagaaaaaaaattgttacaacaagttaaatatttattaaatttgaaggatagaattgatgacacgacatcaaaagtctttgttactggtgatttaaatgccgggaaatctacattttgtaacgctttattgagaagaaagattctacccgaagatcaacagccctgtactgcggtattttgtgaagttatagatgcgtcgaaggaaaataatagcatagaagaagtacacgcagttccaataggtaaagagtacaatattcgagatgagtctacattcgaagtctatccattagaaagtttagaggatttggtttatgattgcgatcgattcagtttattgaaaatctatgttttggaccatcgtagttttcaagaaagtttattacacaatggagttatagatataaaattgattgatgctcctggattaaacatggacctgtatcaaaccactcaagttttctcacgtcaagaggaaattgacttggtggtatttgttgttagtgcagaaaaccatttcacattgtcggcaaaagaatttattgctgctgctgcgaatgaaaaaaggtacgtgtttattgttgtcaatagatttgatcatatcaaggataaagaaaagtgtaaaagaagaattttggatcaaatcaagagcttatctccggatacttataagaatgccaaagaatttgttcattttgtgagttcgagtgaggtgttgaacgaaaatggaggtggcgatgacggtgatcctgatgacgatgacaacaataacaacgacaataatgaccatcctgattttgaccaattagaagcatctttaagaaagtttctcttggaaaaaagatccatttccaaattattgcctgttaaggattatttacttaatatcttactagacttacaaacattatctaaaatcaatgaaaaaatctattatgatgaaaaggttgataaacttcaagaattgaataatcgagtggccccaaagtataacgacattatgaccaaatctgtgagaattggtgatacgatcaatggattgattgaatctacctgtactgaggtatacaatgaaactaataaggaaattgtcactactgtaaacaatttgggtgataaaccaatagtgaaatatcctggactccaatacttgtttgaatatgccaaagagacccaattagcaatgatcgatatagttttagaatcggttgcacgtagtgaagaagtggccaagaaggttacttcaaatagggtagatgagattatcaaatacggacaacagactttaaatgaagagtttttgaatgacaaggtgtttaattcagatttgatgttcactagaagaagagataccattgggaaatcaattgatgatacttttgaaattaatgatttctttgatccttcaattgaatcgtttttagtatttgttgggttaccagagaagtttgtcaagtctgccaaataccagatatcctattttaatccagttggtatgttgacatctatacctcaaaatgcagttacactcaaggaacaattaccatcgcaacttactttgcatacactttattcatcaagtaaaattttgactactggtgcattagtacacaaaatgtaccaattttcacattacgttacccctaaaatggttaaaaagattgctatcccagtaatcattgggatatcaggaattaccatatattatcttttgagtgatattcctaatgcattacctagaaatcaagctaggaaaatcaagaaacaaattggcgatttagactatgcccatcaaaactcagctcgaatctctcgtgaatgtcgtcaagtattaaactatccggcaagacaagtgatgaataatttccaaaccagtattgacaagagaagtaacgaaaaagctgaattagaaaaggttattaaagatgctgaaattagttctggtttctttaaaaatttgttgactaaagttgaacgtcaacaaggtttactcaaggagattgatttggagagcattaattttgttgaataa

SEQ ID NO: 6217 - DNA, 1194 bp, Candida albicans
atgttaatcatctcagaattcaatcctcaattaatgcattcggacgattccgaagacgattatgatcatcaatccagccacagaaactcttctaatggcactactactttcaatcaaataatcacctacaagggacagatttcttcgcttaatgatgctttattaattattgaggcatgcaggctacagaaattacccatggtgacaagaaggttgaccgggattgaaagaaataaatttattaaacccaacaccgtgtttgtatggaacgaaacccaatgtggtatgaaacgatggactgatggcagattatggtcggcctcaaaagtctacaatggaaatttcttggtctataaacaattgaataaaaagactaaacgtgaacaagaagaagaggaatcaggtggccaagcattagttaaacaatcattttcggtggtaactaaagaccatcaaagattccatttaattagttattatgaaaacgttcctggatcatttagaccaaaactggcttcaaaccaaacaacaacgacagtaaatataccaagtcacgattccaagttcaaccaattagacctttcaaatgctatatatcctgacagtttattgaatagcatttacaagagaaaacaccaacaacaacagaataaacaacacccacagcagcaaactgaacaacttcgtcaacagagttactcaccagcaatactacccaacagcaacaacaacccagtatccctagaatctaatcctggtgctggtatcagttccaacttgtattcactcatgaatcaaacttcaactcattatacaccaccatcctccagcttgtcaagctcttccctttcttcaaattcttcaaattcttcaaattcttcaaattcttcatctggcagtataaattcacaactaacgactcaatcttcatcaccattatcgataccgtcactacacattaaatctgcaggttattttacttcttctggacctaatcataatacttttacattacaaaaagctggccctcagaatcgtcagcaacgtgccaatcatccattaactttacagccattatctaaaatctcccaactctcacaaacaccgacatcaggaaacaacaataatactggtattaccaacgattatgatagtcgtaccgttagtgcattgaataagacctggttaaaatag

SEQ ID NO: 6218 - DNA, 2583 bp, Candida albicans
atgtctgaatcaccatcacaaccaccacaaaagaaacataaaccaacaactactggtccatcatcatcatcttcatccaaattaacacgagcgatatcagcatgtaaacgatgtcgaactaagaaaatcaaatgtgatcaaaaattccctcaatgtgggaaatgtgaagttaatggagttgaatgtattggagttgatctggttactggtagagaaatcccaagatcttatattgttcatttagaagaacgagtgaaatttttagaagaaaaactacgattacaagatagatcaggttttgttgatgaaggtgttagtagtacaccacctggcagcagtactattaaaaaaaagagtaatgaaatatcaattaatgaaccattaattaaaaaagaaagtcctttgattaatactaaacttgattcaattgcattttcgaaaatcatgtctacggcagttagagtacagaatagattatctgatccaaatattaaacctggtaatggtaatgttaatctaggacacaattccactaccacaaatgaaaatgggattgacattaataatgatatttctcgagcagtcttaccccctaaatcaacggccatgcaatttctacgagtgtttttccatcaatgtaattctcaattaccattattccatcgtgaagagtttttacgagattattttatccctatatatggagaatttgatgaatcaatatcacttgcctccaacaatactaaaattaataaatcattttttaatagtagtagtagtgatggagataaaaccccttgttggtttgatgtttataaatcaaagattcaacaacttttaaccgaaaatacccaaaatgatattcaaaccattgctaataatataatcccacccttgaagtatcggaaaccattatattttcttaatttagtatttgcggtggcgactctggctaatcatttacgttatcccatccatatttctgaatcatttagattagcagcaatgagattttctcaagatgttgataattcaattgatccattggaacatttacaaggaatattattatatgctggttattcaattatgagaccaacaaatcctggagtatggtatattatgggagaagcattaagaatatgtgttgatttagatttacaaaatgaattgaaaactaaatcgaaacaaaattttaatattgataattttactagagataaacgacgtcgaatattttggtgttgttattcaattgatcgacaaatttgtttttatttggatcgaccatttggtatccctgatgaaagtattaatactccatatcctagtagtttagatgattcaaaaattattcctaatgataattccactgattattattattataaaaaccaccaccaccaccaccaccacgatgatgataatgatgataatgaggacgacataaatttcagttataaaaatgtttcgttattatttttcaaaattagaaagattcaaagtcaagtaacaaaaatcttgtatactaatgctgaaattcctcgagaatataaagatttaaatcattggaaacaatcaatattaatacaattaactcaatggaaacaagaattacaatcaaaattaattctgaaacaattgaattgtgattttaatgaaattttttttcaattaaattatcatcatacattattatatattcatggattaagtcctaaaaattataaattatctttgattgattatgaaaatttaaccaattcttcaattcaagtgattaattgttatactgaattattgaaaactaaaagcataaattatacttgggcaggagttcataatttatttatggcagggacatcatatttatatgctttatataatagtaaagaaattcgattaattaattcaattgatcaagttcaaaaaattactaatgattgtttattggtattacaatcattaataggtcgttgtgatgctgcaaattattgttgtgaaattttccataatttaaccatgataattataaatttgaaatatgcacccaaagataaaaagcatctaacagaacttaaaccagccaatagcattccttcttcttctttttcgtcttcttcttctttttcgtcttcttcttccacgtcatcatcgaaaatatcacgagaaagtctttatcgaattaataatggtaatgttcattccaatttatttcatttagtcactgaattagatcatttaaatccattaaccaaaaccaaaactatcaataataataatagtgatcattttgatataaccaatgatgaaaaacaagatcatgatagtaccattattactgatgatttatcatcgcctccaatagactcatcattattaccattgaatcaacaaactatattacaatggaatgatgaagaattacaaaattttttaaatgaattaaatcaatccaatcaatctaatcaatcatcacctaataataattcatcaattcgtgatgaaaagaaaacttttgaattgattcatgatatgcctaatgaaattatttgggatgaattttttgccaacaaacaataa

SEQ ID NO: 6219 - DNA, 2991 bp, Candida albicans
atgtcaaatacaattccacaatattttattagaattttcaatctaatatttctggccagaaggaaaaatttccaattagcattaatatcagggttattattctttggttcatttgccatactatcaactacatcatatagtaaaaaattcaattattttgatgatttaattttgaaaatatatgattataattatctaactaataattacaacattgactatttagctaaaaatgatccagaagcttatttcaatgttaaagttcaacaaattgttgatgaaaaaaagcaacacgatttagaaagtaaattttggtcacttgatactaaaattaatgatgatcaagcaactttacaaattccagcatatttcacatataataaacctagagataataagaacctagaggattctgagcaatcgtcaaaaccagtggaaaaaccattgattcaaccatttgatccaagattcactttagcaatgtattattattatcttgatcaacaaatgacaaccgcccatcacgattcttcttcttcctcttctgagaattcaattacagtaccttttaattggtatgattgggttgatatgtcagtattgagcaaatacttattagctcccaacaaagataaaccagattgttcaatcttagatgctcatgaagatgctagaaaaattgaaactgaaaagaagaaaatggaaaaattagctaaacaatgggatgaaaataaacgtaaagctgaagaagaaaagaaaaaagccgaagaagataaaaagaaggaagaagaagaaaagaagaaggctgaagaagaggaaaaacaacgtcatgaacaagaaaaacaagcattagaagaagacaagaagaaattagaggaagaaaagaaaaaaattgaggaagaaaagaataagttacaagagcaacaacaacaacaacaagaagagaaagccaatgatggaaaccaaaagcattctaaatttgtcaaacgagatgatgaaatcaaaatgctgactagccaagacaaatcagattcagactctgatagagcaaaaatcgatatgacgacatttttcaatgaagcatttgaaaaactttctgatgaagataaagctagtgttgctaaagatgttgaagatgccgtgaaaaaaattactcaaccttctagttggtgtgttcctaatgctaaactttctatagatcatagtgataaacaaattgttcatcctggatttaacgttttcaaaagtcctggaagaaccactccacaaaaagccattattgctggtaaatcatttctttattcatatgcaccaccaccatccctgattttgtttttaacttctgaaggttcatattccgtgaatgttcaacatagtgcaccacttttaagaaatggtatcccagaatcataccttgccaataataatttcgatgtttcattaaatgttttacaacaattacataaattgaagaaaaatcataaaccagatacagcaaaagttattaatgattatttattacatatccccaaggaaagttttaaatatgatcccgattcaattatatttgattacactaaacgtttagataaaggagaaaaattgactatcaaagaactaaaatatttacaaagtttagaatattctaaagataaagtagctcatggaggtccaccaaaatattttgctgaatcaagattaattggtaccactgtgggagatcattatgattggagatttttcaatggtgttcaatttggaactgtagatcaatcattaaccttgcatcgattaattcgtacttggctatcattcactagaaaaagtggtatcacaacatggatagctcatggttcattattatcatggtattggaatggtatggcattcccctgggataatgatattgatgttcaagtaccaattatggatttacataaattatctttacaattcaatcaaactatagttgtggaagatccagaagatggatttggacgttatttcttagatattggatcatttataacattaagagaaaaaggtaatggtaataataatattgatgccagatttattgatattgatactggattatatattgatataactgcattagcattatccaatagtgaaaccccaaaaagtgatttagcagaattaccgaaaaattttgaaattaaagataataattataaacctgctaatgaattattacaaatttataattgtcgtaataatcattttaattcatatgatgaattatcaccattaatgaaatcttctgtcgaaggtgaaattggttatatcccatcaagatattccacaatattaacacgtgaatatcgaagtggattatcatcaaattctcatggtggatatattttcattgctaaacttcgattatgggttaaagaagaagatttatattatttcattaaacatcgtgatcaatggaccaaatatcatagttttaacactaaattatctcaagatccaagtaatactttattacaagattattcttatttaatgagtgaacaagaatatgaaaatttacaatattctacagatttagaacatgataatccatttaaaaaaaccaaaaaaccattagaattgaaaaattctgaacttgaaaaattaaaacatatgaatgaatcagaattattacaatttttaaataatgatgatattttaattcaattttttaatgctaaagaatttactagtttccatgaactggaaattatgcaattgacttttggtaaatcaacggcaaaattaatgtcactggcaattgatttcccaccaataaaatatgaaccttatttatacaaattgaatcatgatcttgatacttttgaaaataaagttgatcgttatttagcattacaagatgcttatcaacaagaacataataatagtccttctggtggttctgataatgggtttatggaaattgaagaagatttagattttgcattttaa

SEQ ID NO: 6220 - DNA, 549 bp, Candida albicans
atgccagcttatcattcgacatttttagcagaagaacaaaatcaaagtatcaattctggaattcgaaccattggtaatttatcattattaccatttcatactaatttccgaggtccaatttattctgaaaataattctgattatgatataattgaagaagtattagatttatttagagctaattcatttttcaaaaattttgaaattaaaggaaattctgatcgattattaatttatgggattttatttataaatcaatgtttaaccaaattaactaaatttactaattcaaaagaagccacgaaaatattaattaatttaagtgttgataatttccatttacctggagatattggattcccattaaattcattatatgtatcaccagcaaataaatcagaatatgaattattgaaaaattatttgactcaatttagacaagaattgagtgatcgattaattaaaagaatttatcatgatgatcctaatattccaagtaaacattggttagcttttacaaaaagaaaattcatgaataaaagtttataa

SEQ ID NO: 6221 - DNA, 1116 bp, Candida albicans
atgaacaggtcctcatattcatcacagtcagacaatcgatactcacgaaatccagctgtattatgctcattttattcaaaaatcggtgcttgtcgacatggtgagaaatgttcgaaaaaacatttgaaaccaatttcttcaagaactatactactcgccaacctttaccagaatccaacattgaatgatgacgattatggacacgcaaatggcattggtagtgaaacttctcagataatagacaatgaaagtgtgattaagaatagtgatactgtaggtactgtatcgcaaatagatgactcgccgcattctaatagtggagaagttaccaaggacgaaacagttgaaacacaagaggtagagactgagaattcggagaatattgctgaaaccggtgatgtcaagatagatcataatgaagatcagaagcaaatcgaagatgtgaaagaatcggacaaggtagagtcttctgaagaagtccaacaagatgataaacttcacaaagaagacacactagagaaagaatcagaagataatattaaacaagacgaaaacatagaggatgcaaaacttgaagatacagagaaagacaaactccctgagttcacaatcctgcaatcacaaaaagattttgatcaatttttccaagatatctttgtccatatttccaaacttggacaaattagagatattgctgtgtgtgaaaatgaaaacaatcaccttgcaggaaatgtctatgtcatgtttgaaagtgcggaggatgcatataatgccaacttacaattgaatcaggaatggtttaatggcaaaccagtgtacagtgatttgtctcctgtgaatgatttcaatgatgcttgttgtgaagaatatagggattatcacgattgccaacgtggtgcaatgtgtaattacatgcatgtaagactaccatcgagtgatattgaagagtcactatatgaatctcaggcaaaaagttacatgttgaagcaattggaagagctaaaaaaagagcttccgggtgatataagatcttcttcaagtaccaatgatgatgaaaccaatggaaacgaaaatggaatttcttcaactatggctgtgcttgaacagttgtcatga

SEQ ID NO: 6222 - DNA, 1569 bp, Candida albicans
atgtcaaagcttgtacgctcaattaagaatgttgctgggggatattcctctgctcaacgagttgttagaaatgccacttccaatgaccccactggacccaccacgtttgatatggaagaaatatcatcatttacataccaatcacaaacagaatttatggaagttatggatatgttagatcgtcgtcttaatgataaaggtaaaaattggagacatgtggccaaatcattgacggtattggattatctagttcgttatggatcggacaaatgtgtgttatgggccaaagacaatctttacattattaaaactttaagagaatttgttcatttcgatgaaacaaacaatgatcaaggtgcgattattagagttaaagctaaggaattggtatcacttttgagagacgatgagcgattaaaacaagagcgtgctaatgctaaaaagaataaacgttatagaagttatgatgatgatgatggtgatggtggtgatgattttgattctgacagaagaagaagaaatagagacgaacgtccaagaagagacgagccttatgatgctgaactacaacgagcattagaattatcaagaataactgctgaagaagaacaaaatcgtaatagagaagaagagaatgatcctgaattggaagcagccattaaattgtcattagaagaagaagaaatgagaaaacaaaataacaatttattggatttgaatgatgaaacaccaccacaacaacctcaatattatttagcaaccggattctatcaacaacaaccacaattttatgcccagcaacctcaatcgcaacaattccaacaatatgatatgtttgggaacccaatacagaatccaatggacacaggattatataatcaacaggcctattatcaacaacaacaacagcagcaacaacaacaacagtttcaaccaaaccagtttactggttttaactatggacaaccacaacaaccacaagcgcaaccagaacctttacaaccattgaaaacaggatccaataatccatttgccatgtcttctgggtcagacaataccaacaagccaccaactcaatccttaaacagtttagctgaacagcaacaacagcaacagcagcagcaaccacaattttttactcagccaactactgctccactcaaacaacaaaacacatcatcatcaaggtttaatgaaactcatgagttgaatgatttattaactcaaggaactggattagatacattcggtaacactggagatactagaatcccacatcaacatacaaagacacaaaattttataaattcaagtggaactggatataaacaaactggtaatgaaccaattagattaagttctaatgctacaggtaatccatttcttaatactggtattggatatcaaggtgctacacaacagcaagtgccacaacagcaagtgccacaaatcaatcctgcttatactgggtatggatttggtaacgctcaacctcaacaacaccagcaataccaacaacaacaacaatcacgtaatggtaatgatggcccaagtttaatagatatttaa

SEQ ID NO: 6223 - DNA, 3381 bp, Candida albicans
atggttttaaatgattttgatttgaagacagaagctttaaatgaaaggacaactttacacacgagccagaatgcaagttcgaagaatggatcgaacaaagaatctgttcttgccaaatatgaagagaccaatcaaaatgacgaaatagaagggttcgaaaacttgaacgatttatcattttcaaaatactcaaaattttccaaagcatcgattatagttgggagtgaccccaaatctagaactacaacgctagactcaccatttgcgaagaaactaaaggaagatttaaatgttgaattcacgagcgataataccaagccatattatcccaccgtgtatccaatttatgaatttgataacaatgatgaaaacagtgattcacccttcctagattaccaaaacgaaaaaggaaatattcctcagaaacttagtggacagaaactccgcaagcaacaacagcaacagcaacagcaatcagaagctgaagaaaactttaaacagagcaatcaatatgccaggttgcaatctacacctaaacatcagcgaacttcttcagtcaaagtatcgttaacaccagcacaaaagtttgaaaaaagaactagtacgcgtctgcacaatgcgttagataattttgagttgactacattagtggggaacggggcttttgcgagtgtctacagggcagtaaacctcaaaaccaatcaagtcatagcaatcaaacagattcgaatagagaaagatcaggatgtcggagttttaatgggagaaattgatttgttgaagatattgaagcaccgtaatatagtaaagtatcacggatttgtgaagacagcaacttctttgaatgttctacttgagtactgtgaaggagggtcattacgccagttgtataaaaagttgaagaaggggctacctgagtatcagataattaattatgttcgacagattttggagggactaaattacttgcatgaacaaggggtggtacaccgagatgtcaaagccgctaatgtgctactaacagataagggcgacgtgaaactagctgattttggagttgcaaccaaagttacatctcaacatctaactgttgtgggtacacccaattggatggctcctgaaactgttcttgggggagaaggtatttgtaccgcctctgacatttggtcattaggagcaactattattgagttgtttaccacaaatccaccgtatcacgacctcaatgctatggcaacattacatgctattggtaccgatgagcatccgccattaccaaaaaatatgtctactcttgcaaaagactttctattggaatgttttcaaaagcaagccaatcttagaataagtgcaaaattgcttttgaaacataaatggttaaaccaaactgcaacagcaaagacttcgatggccaccttattgagacaacctagcagagagttgaggtcaatcaagatttattctgaatcaaatgatgaaaattgggatgaagattttgaggagatcaaagtgtctaagtttcaaaactcgacatcttctataatagaattgaaaccagataatacagagaaacagtttaaactcacggagtattccaaaaaggatttattaactttatttgctgatgaaaaggaagataccctgggcaattttgaatttgaaactatcggtccaaataaactagcagtggttgcagaaagtatggatgaatccgaccccttcttaaatatagacattgagaactttgatacaaacgaattagaagtacaaagcaaaatggaatatttggtagtaaggttaagtcgcaagttagagcaagttcatctaggatacgaagatgcagtaccagcattagtaaaagttacaggaagaatgctacatcttgttaagaaatatccggtactgcatgataccttgattcgagaccatggagttttgtcattgttggaactcctagagagttttcaagatattccaagccaacaacagctatggtatcattgtctttctatattgaaccatgttttcgaaagcgacttaggcacgctcgagaacttttgtttcttgggaggcatacccactgtagcgcatttccgaagtgcgacctatgaagtacaagtacggttgcaagttgctaaatttattggcattttgaatttatcagaaaaggccttgtctatgtttgtttcttgtgggggactccgtctagtaagtaaatttgtggaagaagattttgataccactcctaccttcccattgattgcaatagagtctattcacaacatattagccaaagatttaagtagatcgaaatctgatttgtgccgtattctatcaaagcatggtgtgattttctggttagtggttttgttgaacagattggtcaaatatgatcaaaagcccctgataaaaaacgtgtctaaagaacaagttgaaataacaatagaacgaattattgatataatcaaatacttcagtcaatctgagactaaagttagaatttctattgggtcgatagacttgttcaaattgatattcaaattatttgacaatttaaaattgtctcaccagttgactttgctcaagtttgtgaaatccatgtcttgcatatcagaagtgttgaagaatttatatcatgccgagatcttggagtttttggtcaagttgttaaaaagctacatcccctccaaaggcaattacaaagagattattaatgttctagctccaatattgtataatagccttgctttgaatcatagaagggagtcagagtttgtcaatttaggtggattaccttacttgaaaaccttgtctataattaacttaccattcagacagtttattttgccgataatatgtgaatttgtacattgtgatgctagtgtcgtaaacgaattaaaaaagaatgacatagtcaaaatttattataacttgttgttggatccttactggcagtcaaatgctttggactcgctacattgctggtacaaattggaaccatcttatattgatttgaattctcctatggcagtcgattgtttggttggagggtttttgcttcctaaagtttctaatttggagagtactttggaaatctacttcaagttattgaccaataatcttccattaacgagagatatgctgaatatgaatgtcataaacagcatactaatcaaattatcacttcatgacaaaaagaatccagtcattcaactcctgtatttgaaagttttgaaatgcttgataaattatttggttgactctaaaagttctttaccatttgcgaaaccggtagttaatacattgcagtcattaaagctgagacaaagctcattgttgattgaagaagtcactacagaacttttactggtgctaaagtag

SEQ ID NO: 6224 - DNA, 4164 bp, Candida albicans
atgaacatctcttctatgttatcatcagataataatgtgtcgttgaaagagtcgacgtcaacggcaactgatcaacagcaacaacagcaggcagaactggtggatcatgcaacaatcaatggaaatggacaaacatcagtactggcagtgaataatgttcaagagaaccatctatcagaatttcattcactgaaccaacaacattccagtatacctcctgttggaactactgtggaacacgccaccacaaccaccacaaccgcaactaaccatcaaccagttaatctgtcacctttgaaacattctgttgatgaaaattccaatcctactaccatatcctcattgaaaaaagacacaaactctattattgctagtatactaccagaaagttatcaatttgataattcatatacacctacaatagatcaaaaatacaaatcagtatttgaatccaatataaatgtcattaatcaattagatcaataccaacaaatgggtcatcatttgaaattaatgaaatttgatgaagttaaattgaacaattatcttattaatactggtcaatttgcttcaaattatattgatagagttgttgctgaagatatatcttcaagaaataataaaattagtgaaactaataaaaataaagagttaattgctattgattattcgaaaccattacatcataatagtactagaggtaaagaatttaaatggggttcaacaaggaaaattcataaagttgaacacaaatcaagaagaagaaaacctgctgctacaaccagtactacagatgattcaaataaagctgttgctgctgctgcaaatggtacaaaagatcatagtgctacagcaggaaccactgcctctgccaatggttctgatacacctgatcgccgtcatcaacgtcaatcttcaaaaccttcaactcctattttgataaaaccaaagactgaacctggtaaaggactgcctgaaatacaaccaagaagaagtagtcgtcctaaagtgaaaagaaaggcatttgaagatgaattagaaactgctgacaagcaatcatctactcaacaagtaaagaaatcacaagaatcgactggtagagatcataaacgtgtcaagattgagaataaacaggaagaacagcaacagcatcaacagcagcagcaagcagatgaagaagacgaagctgaagcagaagcagaagcagaacaaaagcctaaatctggtgcattatcagaagctgctgctgcaggtatgactgctaaagaatttaaagcctttatgagacaatatgataatacatatattgccatttggaaagatttgtcgagaaaagatggaccgaaaggaagtaggctgatgcaacaagctactcaaggtagacttattaatcttagaaagacggcattattggctgctagagaagctaaaagatggcaattgaaaaataccaagaatcaaaaagatcttactactaaagccagaagagccatgagagaaatgtttaatttctggaaacgaaatgaaaggctcgaacgtgatttgaagaagaaacatgaaaaggaattattagataaagccaaaaaagaggaagaagaaagagaagccaaaagacaactgagaaaattaaatttcttaattactcaaaccgaattatattcacatttcattggtaaaaagattaaaactgatgaacttgaaggtactaatgctgatgataatttgaaatcaaacaccaaagaacatttggataaatatgctgatgttgatggatctgccactcatgatattaatgctgttgattttgataatgatgatgaagaagcattacgtagaatggcagcccaaaatgcacaaaatgctcttattgaagtgcaaaataaggctaaacaatttgataatagtgaagaatcattcaaaaatcctgacaccaatggtgaagaaatgaatttccagaatccaaccttattaggagatatcactatacctcaaccaaatatgttgaaatgtactttgaaagaatatcaattgaaaggtttgaattggttagcaaacttgtatgaacaaggtatcaatggtattttggctgatgagatgggtttaggtaaaaccgttcaaagtatatcggtattggcatatttagctgaaacttataatatgtggggtccatttttggtggtgactccagcatcaacattgcataattggcaacaagaaattacgaaatttgttcctgaatttaaagtattaccatattgggggaatgctaaagatcgaaaaattttacgtaaattttgggataggaaaagtcttcgatacgataaggattcaccattccatgttttagttacatcttatcaattgattgttgctgatattgcttatttccaaaaaatgaaatggcaatatatgattttagatgaagctcaagctattaaatcatcgtcttcatcaagatggaaatcccttttgaatttaacttgtcgtaatagattattattgacgggtactccaattcaaaattccatgcaagaattatgggctcttttacatttcattatgccgtcaattttcgattctcatgatgaatttagtgattggtttgctaaagatattgaaagtcatgcacaatccaataccagtttagatgaacaacaattacgaagattacatatgattttgaaaccatttatgttgagaagaatcaagaagaatgtacaaagtgaattaggtgataaagttgaaattgatgtttattgtgatttaacaacaagacaaaagaaactttatcaacaattgagatcacaaatttctatgctggatactgatttacttgaacttgaatctaattctactagttctgatagttcattagctaatttagtgatgcaatttaggaaagtttgtaatcatcctgatttatttgaacgtgctgatgtcaattcaccattttcatttgggaaatttgctgaaacaggttcatttttaagagaaactaatgaattggatgtaaattattcaacggaaaatattgtccaatatgatttgcctcgattaatttatgatgaactattaaccccaaattataacaaactgactcgtgattccatttattccaaatttagtatttataatcctgaaaatatgaatgcaacgggttggttacaaggtattaatgtttctcctaatgaattgaaacattattctcagaaggatatactttcaagagctattgaaatgcaaaataaaccaactgaaactgaaaaactagaaagaataaattatctttatgaaggtgattacattcctaaaaataaaaaattactaatcaccgatcatagtaccagtaccaatagcagttttatttcaaattcgttggtgttttctgatcttgtttctattaaggagaaagttagtcaagatatgtatttgaataaattagaaccagcagtgacacccattgcatctgctccgccaatcactgtgaattgttcatcaatgaattttaccaataagatgaataatacattatttgattccaatataagatcatcattaataccattatcattatctactgaattaaaattaatgaaagatcaaatcccattagaacaatatccaaaatcaaacatgttacccatgccaatatttgattattccaatattcgtatgccatcaatggatagatttatagctgaatcggggaaattagccaaattagatgaattattaattgatttgaaacgaggaggtcatagaattttaatttattttcaaatgacaagaatgatgcaaatttttgaagaatatttagcttataaaagttataaatatattcgattagatggatcaacaacaattgaatcaagaagagaaatggttcaagcatggcaaaccaaccccgaaatatttatatttatgttatcaacaagagctggtggtttaggacttaatttaactagtgccgatacggtgatattttatgatagtgattggaatccaactattgatagtcaagcaatggatagagctcatagaattggtcaaactaaacaagttaaagtatttagattggttactagaaatactattgaacaaaaaattcttgaacgtgctaaagaaaaagaagaaattcaaaaacttgtcgttggtaatatgtaa

SEQ ID NO: 6225 - DNA, 1524 bp, Candida albicans
atggcaaaaaatccaagaattcagatttaccagtgtatgtttaactttttatttttttttttcacgttgttgttgttgttttgttgttcaatactaacaaaattgaattttttttttttcatatttagatttaataagtttactcctaaaaagcattcagatcgtgtgttgataaagcgagtcttgtatactttggtatttttattggtaacgtatacgatatattcaagagtgttaacaggtgatagcaggataccgcaatcgcaggatcgacaacaatcaccgaccaacgacaataatcatgaagtgtataaagttacaaaagatggagtatataagcaggaagttactggtgttgttgaagaagtagaagaggaagaactaaaggaggttactacagaagatctctacaagtcgaatgttgacatttttgatttaaatgattatcaagggtctcaagaaggtgctaaaaatggcgatattctattatttcttatgcctttgagaaatgccgaacacgttttaccaatggcattctataatcttatgaacctcacttacgatcatcgtttgattgatattgcatttttggtttcggattgttcaccagatgacaccacgttggaaactgtttttgaatattcagtggctttacaaaatggaactttggttgacaagttgaaacatgaagaagagttgaagaattcaggtaatgtcaggggcactagtgatttatatcaatcgtatatggagccatcttatattgaaagcgtaaagaaagcctatagtaatcctgagtcgcatcatccaaactataggaccccatttagatcggtcactattttcaaaaaagattttggtcaagtcattgggcaagggttcagtgatagacatgctgttaaagtgcaagggattcgtagaaagttaatgggtagagcaagaaactggcttacttctgctgccttgaaaccataccattcctgggtttattggagagatgctgatattgaaacgtgccctggtgatgttattgaagagttgatgctgcataattacgatgttatggtacccaatgtgtggagacctttacctacatttttaggcaacgagcagccatacgatttgaactcttgggttgaatcagatgctggattagaattggcgaaaacactaaacgaagacgatgttattgttgaagggtatgctgagtatcctacttggagagcacatttggcatacatacgggatgctaatggtgatcctcgagaagtaattgatttagacggtgttggtggtgtgtcgatattggcacgagcaaagatttttagacaaggggtacatttcccagcatttacatttttaaaccacgctgaaactgaggcctttggtaaaatggccaaaaaaatgggattcagtgttggtggattgcctcattataccatatggcatatttatgaaccaagtgaagatgatttgaaagaaattgcgagattggaaagaaagaaaagaagacagaagtcataa

SEQ ID NO: 6226 - DNA, 1284 bp, Candida albicans
atgtctattgtattaccatcaggaactactgacggatttaaggccgtctccaaatactctgccccagtgcgtcgtccaattgaaccagttggtcgttacttcttagcccacgcctcaagaactttgcgtggacacacttggtctgaatttgaaaaattggaagctgaaaagaatgttaaacaaatcgaagtcaacgaagatgaggatttgggagatgaagaacaaagtgaagagttattagaacacgatccaagagaatggaagactgccaatttatatgctgttttaggtttatctcatttgagaagtaaagccactgaagatcaaatcagaagagcccacagaaaacaagttttgaaacatcatccagataaaaaatccgctagtggtggattagaaaacgatggatttttcaaaattattcaaaaagcctttgaagttatgttggacccagtcaagagaagacaatacgattctattgatgttgaaaatgatccaaaaccaccagctccaaaatccaaatacgatttctttgaagcttggggtccagtatttgaaagtgaagcaagattttctactaaacaaccagttccattgttgggaaatttagaaagcaccaaagaagaagttgatgctttctacagtttctggggaagatttgactcttggaagacttttgaattcaaagatgaagatgttccagatgacactgccaacagagatcacaaacgttatattgaacgtaagaatattgccaacagaaagaaattgaagcaagaagataacaagagaattatcgaattggtcgaaagagctcatgctgaagatccaagaattaaattgttcaaagaaaaagccaagaaagaaaaggctgctaagaaatgggaaaaagaatctggatcaagaaaagctgctgaagaggctgctgccaaaaaggctgctgaagaggccgctgctaagaaagccgccgaagaagccgccgctttgaaagccaactctaaaaaagctaaagaagctgctaaagctgctaaaaagaaaaacaagagaaacatcagagctgctgttaaagacaataattactttggtgactcagctaaatctgccgacattgatgctgatgtcgatttgttaatcgaaaaattcgacgatgtcaaattaggtgaagttgctgataaagttaaagatgctgatgctgcttcagtgaaatctacttttgttgaagttgcaaaggaattggttggagctggttctttagatgcttcctatttgaaatattttaactag

SEQ ID NO: 6227 - DNA, 1548 bp, Candida albicans
atgaacacatctacaacaataacaccaaatgaatcaaatccccaagaatacggtccacaacctatagaactcacaacttctaacagtaaagatgatcaacacaacgtcaataataatgataactgtcttaatgaaaataatcattcaataatcacacgatcaatcacacgatcaaccaccactatatctcatcaatcgtcgtcattacatttattagatgatccatctaaattccccgatggttggaacaatagagccatgataactttgtttggttcatttttaggtatgattggatcattaggatatgtgaattcaggaggtgttatacaatcatatatatcaaccaacattttaattaatgattctcaatcatcaattggatggatttttctgatttataattttttcgcctttggagggattttaattctggggatcatatttgataaatttggttgtaaaataccgatttttgttggagtgataattatgtttagtggattattagcaacgagtttttgtcattctttatatcaatttatattggcttatagcatcttagctggattaggcaccgcgtttgtatttggaccatttgttgcttgtttaagtcattattttttacataaacgagcattagtgattgggatttcttatactggtggtggattaggtggagtgatttaccccttaatgtgtcgatcattattttcgaaaataggttatggatggacaatgagaattggtgcatttataagtttattttgttgtggtataggttggttattagtaagtgatcgacatgaagagttttcaccagatttagaaaagaagaagaagaagattaatcaagagattaccactacttcaagtaacaatagtgttattgatcgagtagaaaatgaatttattagtataattaaagaaattttccattctattgattttaaaattctatacaagaatttactatttactgtattggtatttggattattatttaatgggattgtatttttaatttcaattgttcaattaccttcttatgctatatctcatgggttttctgaacaacaatcatatttattattagtagtattcaattcatttagtatcccaggaagaattattccaagttattttgctgatcaagggttgggtcgtttcaatactttttgtttaataaattgtttttcattaattgcctttgttgttatttggttaccatttgggaatcatttaaccgcattatttatctttgctggatgttttggattttctagtggatcagtcctaagtcttactgctagtcttgtggctctgattgtgaaaacttctgatgttggtaaaggattaggaacagcttttttcatactttcaattgccgatttatttggaattccaattgctggagcaattgctagtggtagtaaacaaagttataacaatttagtttattttttaactgcttgtgcagcaattggtgctatagtaagttttatatctcgatatctttatggtgggtttaatcttaatagagtttaa

SEQ ID NO: 6228 - DNA, 492 bp, Candida albicans
atgtcagaaacattgggagacgaatattacccatcatttgctccatttttagggtttgctggctgtgctgctgctatgatattatcctgtgcaggagctgctataggtacagcaaaatcaggtattggtattgctggtatcggtactttcaagccagaattgatcatgaaatcattgattcccgtagttatgtcgggtattttatcggtgtatggattggttgtttcagtgttgattgccggtggattatcgccgcaagaaaattactcattatttaatgggtgcatgcatttagcctgtggattggccgtggggtttgcttgtcttgcctcaggctatgctattggtattgttggtgacgaaggggtgagacaatttatgcaccaaccccgtttatttgttgggattgtgttaatattgatttttgctgaagttttgggattatatgggatgattattgccttgattttgaatactaagggaagcggttaa

SEQ ID NO: 6229 - DNA, 6051 bp, Candida albicans
atgtcattcaaagaattattaatcgaaattggtccagaaaacttattaccagaaaaattgttaccaagcttattgcagatcaaacccaacgaaattgatcaaggtatagcattaatattagctgaaatattgatacctgggtctcaagggttatcccaaggattgacttttgccagtagcttgccaggctcaaatgccaaaggcgctcaattacaagcatgtttcaaatctattgaaaactctgggaaattcaatgtcaactggtacgaagtgtttaatcacgtgcatcaatatttatttgactcgtcacaaagagatatccaaccatcagttggcagcattacccagtttttatcgtcattagatttcaaacaagaaccaatagatatattcttgaactacgaatggtggttcaataagacgttgttgtatatattgcactcactggatgcatcccagggtggttatgatatatcgttgctgcctaatttagcttattgttttgaggaagataaaaccactccccaaacaagaagaaacattttgaaatttattaatgtgggtaaactagaaatccaagtgataaccaaaatacaacagcaacagcaacagcaacagcaacagcaacaacaacaacaccaattgagtgagcaagataagaaactaaacgcgtttttaaatcaattgtttgagcatgattatcgtgtgttcccagaatatattttggccgctgcattaactgtcgttgagaaatcccaatttataaatgacttgattgacacgttgttttatttgttggtagatagcgctagtccttcgttgcccaaagtagtacgtttactcaaggaatcgggacttgccgctatcaagttggctgattactataagagcagaaaaaccattgatgcagcagacaaagtgttgactttggcatcaagttttggattgacccaagaaatattggatatcttttgggcatttgatctgaaaattgctataaaaattttggtagaatccagtctttttggatatgactacaaatctgttattgactccaagcttaaagatccacaggtcaaaacatccatctatcaagcattgtgtgaagcattggacgagcgggcccaaaaagattatgaaaggggccaacaggttcagcaagcacaacaacttcaacagcaacaagcgctcccacctcatcaagttttgaaaatccctactgtttattatttacttgaaaaaatcaaatcgagtaatggagttgttgatgctaagaccttgagaaatcttcaattattgttgttaacaacctatccaaggttaatcaatttcggaaatggtcatgatgaagccattttggccaacgaagagaaatctccattcttcccaccttctgttgaaatggaaatgaaagcttattattcgaaaatgtataacaaagagcttgagattaaagaaattgttgacatgttgactcaaatgaaggccagcgatgatctccacagtcaagatgtctttgcatgcatgatccactctttattggacgagtataagtttttctcagagtatccattgtcagcattagcttcaacatccttgttgtttggtgcacttttagaaaaggatttgattcaaggtacgactttaactgttgcattgaattttatttgggaatcttgtaaccaaccgcaagattcacatttgttcaaatttgcggtacaatcattgtacaacttcaaatcaagattgcatgagtatccaatttattgtaaacacttgttggaatgtcgttcattatctgcgcatgccaagatgtaccaaatagtgaaggatgcagctaatggtattccatgtaccactggtgcagctcctactcaaactaatacaccagatgttggcccaaaatatcagtctattaattatgttgatagaactataggttatgcaacccaagaagaaccaccagagtctatcagagataagttattattcagtgtcaacaatatgacaggtgaaaatcttagattatctgagatccaagaagtattgactgagagttatttcgcatggttttcagattatttggtatcagacagagccaaggcagaaccaaacaaccacgaattatattccaagttggtcaagtcgttagcaaatccaatcttttttgagtatattttgaatgtttctttgaaagaggttgattatattatccgtaattttaaggattcaagaagcgaaagaaaccaactaaagaatttaggtgcttggttaggacgaatcacattagccaatgataaaccattgagaagagattatattgccttgaagtttttattagtggaggcgtacgatttcaactcgttgccattgattcttccgtttgtgtgtaaaatcttggaccaggctcaatattcaaaagtgttcaaaccaccaaacccttgggttgttggggttatgaaggttttagctgagttgtatgaatgtgctgatttgaaattacaattaaaatttgaaattgaagtgttgttgaattcattcaatatgaagatcaaagatatcgagcaaagtactattattagaaatcataatcctgaaccaactgcattagcaagaatgtttggtatcagttcacaatcagtgaatttggcaaatgaaatgacaagattgtctttagagggctcgcaattgggtaataatatccaagcaccattcccacaacaaattattgaatctaaacagttcccaggaatctcccaaccacagatgcaaaatgttttacaacagcaacaacaacaacaacaacaacaacagcagcaacaattaccaccgcagcaacagcttccagggcagttgccacctcaacaacaagcggaaccagctttggataccagtttcagcacgttaattgggaactctattttcactcagcatgcaaatttgcgcagagcatttcaagcatctttatctcgtgcagttagagaatgtactccacacatttgtaacaaagttgtggaaactgttgttaccaccaccaaagctttaatcactaaggattttgctacggaacgtgatattgagaaatttcgcaacagttatcagaaattggcattgctgttgtctcatgcaatggtgtcatgcaatggaagaaaagcattagttgaaacaatcgaggctactatgttgcagttattgggcaacaatccaaatgaagtacctttagctgaattgaatagtgccattcaagccaatgttggtttatgtgttgatattgttgatgtgttggtaggtgaaagtattcttgacatcatagaggcaagaatgcagacagaagtgtttttgcgtgaacatcatactgccacagctccaaatgaaccatttattgcagaaggggccagtgattactcgttgagattaccaaatcctttaggattagcacttaccggattgagtgcacagcaattgaagatttatgaacattttggagaagcaagagtggatcaaattgtacctcctccaggaagtaccggtataacacaacaacaaacacaatcattagcaccattacaacagcaacaacagcaacagcaacagcaacaaccagtatctacagtagtagcggcagcaccagcaccagcgccaccacaacaacaacaacaactgaaagaacgcattgcacaagcacaaggtgttcctgatgatattgtttcgtttgaacaattgtttactgctattactgccaactgtgacaaagccgttcaacttgtttctgaagtcacagaaaccaagttagcagatttgccaccaaaccattccattatggcggcattgactcaagctttggtgattgcacagaccaatgccataaaatatcctgagttgttattaaaggctgcacaatatgcagtcaactgtttgtttactcagacacacgaaaacccaatgagtaatgaaatctatgttgttattttagacaaattgtgtgagtattcaccttctaccgccaaagatgttatttggtggcttgtacactcatctgatcaacgtaagtttaatatgccagttatgctttcattattgaaagttcaattaatccagccaattaaattagatttatctattgggaaattgattaaagaaacaaataatccggttgtagtaaagtttgctgctagtttgttgacgaatatttttacttccgaagagatgcgtcctattgcgttacgatcggaatttgctaatacattagatgccttatctaaataccaagcaaatgatcaaagtgaagaagacagacaagcaaaggaggcaactagtacattgttcaaactcttgagtgaggcagcacccgcttcaaaccaattatttgctcaattgggttatatatttgctgaatgggtaagattgttgactcatggagacgatgcaacaaatgaattacaaattgaatttgtcaagggattgattcaatctggtatacttaataatcctgaatatgtaaagacttttttcaaagcggccattgagatttccattacatcgtttgccactgaacatgaattacgttcaagaactcaacatgaaacatactttgccgttgatacattggctatgttgattgttcgaattgtattgttagttgaagattctaagcaagctattgattatttgaagaaagtattgggaataattattttgaatttaattaatgaccatgaaacttcaaaggccaattggaatgaacgtgcttatttcagatttttttcatctttgttatcgacatggtgtgatgcttcagttttggatgaagaagttactgttaatttagatgttaaattttataattatcttggagaattatttaatgccttgcagccaattgttttacctggttttacatttgcttggatttcattgatttcacatcgtatgtatttgcccaagttattagaattaccagagaggaaaggttatgcaacattggtcaaattattgagttcggctttgaaattccaacaaatttatggtaacaacaagcaatcatcaagacgacaacaagaacttgaacaagaacaagaacaagaacaaaaagatgaaaaagatgcaaaagatgcaaaagaacaaaatcaagaacaagaacaagaacaggaaaactcacaacaaggacctgaagtgatcaatgtaacttataaagccatcaacagaattttcattggtattttacatgatttccctgaatttttagttgaatgccattatcaattggtgaccagtattccaagaggatatattcaattaagaaatattgttttatcggccacacctaaagatatccatgtaccagatcctttcactcaagggttaaaagttgaaagattacctgagatcaatgaatcaccagtagtgttttataaaccaattgaagatttgagtaaagttggattaaagaaacccgttgaaaactttttaagaattcctgccccagggttgatgagaacaatttataatggattaaaattgaatcagcctaaagaagtgaatgaattagggtatgaggaaacgatcaatttcaatataaaattgatcaatgcgttggtgttgcacgttggaatatccagtgttgctgatagattacccaacaatcgaggatttaataccaagtcatcacaagtggcattattggttgatttaatgaattatggaaacactgaattcaaatatcatttgatcaatgctattgctaatcaattgagatatccaaatagtcatactcattggttcattggtattattttacattttttcagtaataacaatatttggaacagtaatggtaataagttggttgtacaagagattatcactagagtattattggaaagaagaatcagtaataaaccacatccttggggattaactatattatttactgaattggttaagaatggggattatggattttttgaattgccatttgttaaagattctgttgaagaagtgaagaatattttcaatgttttgagtataaatgttaaaggttcaactccttaa

SEQ ID NO: 6230 - DNA, 738 bp, Candida albicans
atggttgttgacacattgatttatcatcctacattaagtaaattaattaaattttgggattctactcctaaaagagagaaaacttttagattattatcatatttatcaagatttcttggttattatgcttataaaaaaggttattctaaagaaacaattgaattgtggagtaatttaaaagctcatttcacatttattagaaaagccatgagattttttaaaccaattaatcatttacaattggcttctaaagcttttgataataaattaatggatccaattttacaatttactactattattagaaatttgggttatgctggttatttaactattgatgctattgtatttttcaaattattaggaattattgataaaaagaaatatcctaatttaggtaaatatgcttcaagattttggttacttggtttaattgctggattaataaattctttaagaataatttatagtttgaattcttatgaaaatgatcaaaaaaacacccaagatgaaaaggtaaaggaaactgaaactgaaactgaaactgaaactaaagctgatactgttgctattaatcaaaaattatatcaagctaaaagaaaattgatttgggatttattagatacttttattgcattgaattctttagatatcttgcatttcactgaaggtgatgttggtttagctggggttataacttcattattaggtttacaagatttatggaaagccacttga

SEQ ID NO: 6231 - DNA, 1137 bp, Candida albicans
atgctacggcatttggtatttattttgattgcaatacttttattgacattccctcctaaaatcgaatctttattcaaatcttttatcatcaataaaccaactaaaacaacatgttatcaatataccactcgtgaacaacttaaatcaatacttgaatcagatacccatgagacaaatttttgtattgaaaaaccttccatatcacccccaaaaacaaattctacattgttaatgttatgtcgaaattctgatgtcttctccgtattagaaaccattcaaaacattcaggatcgattcaatgataaatacaattatgattacacgtttttaaatgacgttcccttcaattatgagtttatttatttagtatcatcaattatccctcatgggaaaatcaattttggtcttataccaattgaacattggtcatatccatcacatataaatatatcattagctactgaaatcagacaaaattatgctaatgtcccttatggagattcagaaagttatcgacacatgtgtcgattttattctgggtttttttataaacatgaattggtcaaacaatatcaatattattggagaatagaacctggcattaaaatatattgtgatattgattatgatgtgtttgaatatatgataattaatgataaaaaatatggatttgtgatttcattatttgaatactcggaaactattcctacgttatggaatcatgttgttcaatatataaatgataatgaaatcaaatcagaattgttaccacttttgactaataaatataattggtataatttatgccatttttggtcgaattttgaaattgcaaatcttgatatatttaataatgatgattatgaaaattttttccaatatttggacaatttaggagggttttattatgaacgatggggtgatgctccaatacattccattgctatagcattgttcttacaaaaaaaggatattcattggtttgaaaatataggctactatcatgttccatatctacaatgtcctcaagatattgacttgtacgtcaagaataagtgtacttgtaaccccgatgaagattttacatggagtgaccttagttgtactaaccatttcttgaacattctacataattga

SEQ ID NO: 6232 - DNA, 1353 bp, Candida albicans
atgaggaaaacattaacttcaatccgttttttgtctgacggtattcgtgtcaaagataaatggaatagtttgatctccgatctcgtggttgaacctacaaatagtacaggtccactctctggaaccacttatatcgtgaaagacaatatagccacaagccatggttataccactgctgcatctaaaatactatctaactatgaatcaccttttaatgccatgataatagatttgttgtcaagtaatggttcaaaactaatagggaaatcaaatttggatgaatttgggatgggatcagcaaattataattcgtatttcaacaaagttactaatccgtatgataatactaaagttccaggtggatcttctggtggctctgctgcgtccgtggctgggaaaatgtgttcattcagcattggaactgatactggaggatcagtgcggttgcctgcaagttattgtaacgtatttggattcaaacctacttatggtcgaatttctagatggggggttataccgtatgcacagacattggatacagtggggattataggtgaaaatgtaaatattataaagcgtgtttacgatgtgcttaacaagtatgacgataaggatcccacttgtttgcctgaagaagtgagacagaaaattcctaccactaaaaaagaaactttgactatcggtgttccacatgagtttgtgttgaaagagctatcggctgatgttagagaatcttgggaatatgcactttccaaaatatgtaaattgggacatttggtaaaacctataagtataaaaactatcaagaaggcactaccatcatactatactttagcaactgctgaggctgcatcaaatctttcaagatatgatggtataagatacggatataacaccaatgaatcggttaattctcccatagaactaattgcaaccaatagatcaaatggttttggaagcgaagtgcagagacgtattttattgggaaattacactttgtcttcagactctggagaccattatttgagagccacgcaaattcgagaagaattgtgtgcagagttctcttccattttcaacaattctcatgtgttgcttcaggatgagcaatcgctggataaggtagatttgataatggcaccaacatcaacaagtactgcacctacttgggacgagtttgtttccgcaaatgaaaaaaatttcttaaacagttatgtgaacgatgtgctaacagtcccggcatcattagcagggattccagcaatttctgtgccagttaatgggatcggaattcaattgatgggacaatttggtgatgatgatttggtgttacaattggctgatcaaatttag

SEQ ID NO: 6233 - DNA, 2517 bp, Candida albicans
atgagtatttcatcaactgctagtacatcaactactactttttatcctaccagtaataggacttcaatagatactactgctacttcaatcaataatgattatgtcaacactaataagcctactagactatcgacgacttcaagtttatttactatagattccgaattaaatgatttatatccagaattaccatcaaattttaaacttattgaattacttggtgaaggagcattttcatcagtttataaagctattgatatctcgaagaataatatgattgttgcgatcaaaatcattaataaaattaatcttaatctgaaacaattacaaaatattattaatgaaatcaatatattaaaacaaattaattatcatcatcatcctaatattattgaattattaggggttattgatggtattaatcaaacgtttttaattttggaatattgtgatggtggagaaatttttgatcaaatattaaaatatacttatctttctgaacctttatcatatcatgtttttaaacaaattttaaatgctttacaatatttacataatacgttgaatattgttcatcgagatttaaaacccgaaaatttattattcaataaaatccctttctttaaaagaggaataaatgataataacctagagaaatatttaaggaaatctgatgatattaatgaaaaaatcgatgaaggagaatttaaatatggtataggtggtggaactattggtgtaataaaattagctgattttggtttagctaaacaattaaatgataagaatattgctcaaactccttgtggtactactggttatactgctcctgaagttttccaatgtaggaataataataataataataataataataataataataacaatagcaacaacagtaataaatcaagtggcggttcaggttcaggttcaggttcaatttatcatcaattatttaaatcttccaaatctaaagtcaaaactaaatccaaacaactaagtataaccaattattctaaatcagtagatatttggtcattaggatgtgtattatacacattattatgtggattcccaccattttataatgatgatattgaaatattaactaataatgtaatcaatgggaaatttgaatttttaaaaccttggtgggatgaaatttcaaatgatgctaaagatttagtatcaaaaatgttaattattgatcctaatgaaagaattactattgatgaaatttggaatcatccttggattttgaaacatatgaataatgaaagtaagcaaagacaacaaaaacaagaagaagaagaagaagaagtaccaggttatttccctaatcataataagaatactaatattattaaccaaactatatttgaaaatgttcatgaagatataatcaccccaattaataaagaaaaagaagaagatgatgatgactactctttatcattggctccacctccatcatctcaacaaatattaagtaaatcacctagagcaatagcaattaaaaaagtatttgataatcctgcaatgacaaccaataaatcaattaaaaataaagcaagtatttgtcatggtgataataatgatgatgacatttattttgctaatcaagaagaagaaaaagaaccattaagttttttcattgaagatattgctgaattagatgaagaagacgaagagattgaatctgaggtaacaaatgactctgatgattctgattctgattctgatgaagatgttaatgtcaatgtcaatgaaattaatgaacatttgaaaattatgggagatttaccttttaaaactaggaaaaatcatcatgattatattaaaactccatatcctaaattaattagttttaaagatgttttcaatttaaataaaattaattcaccccaagaagataatgaagaagaagaagaagaagaagaagatttaaagaatcaatttcatagatttaagctatctccacaaaatttaaattcattaaataagagcaacgtcattgacaatttgcataagaattcaattaataataatgatagtgatgatacaacatcgacgacaacaactaattcatcaatacttctgaatactcctacttatacaacaacaaataacaacaacaataataataatagtatagataactatggcagatcccttctacgtactagtaataatgataatcaacttattgacaatcatgatgaacatgatgacaccacaaccaccaatattccaaatcatgaaactcgttcatcatcaataatatcaggtttaaatggtgattttaaattcactttaaatttaacaaattcaaatttattaactcgacgtaaaaatagtaataatataatctcaccaatcacctcatcatcatcatctactacaagtagtagtaatattattaatccaattaaatcaattaaaccaacaacttcaaatataggtgatgctactactacaattataaatactaatgctactgctaccattatttga

SEQ ID NO: 6234 - DNA, 528 bp, Candida albicans
atgtttagaagatcgttattatcaacatcaagatttatcaacaagtcatcatcatcattatcacctggtttattattgaataatttccgtggcaatttccaacaatcacgatttatatccactgaattaaaagatgcattagataaagctgttactacatcccccgtagttttatttatgaaaggtacaccagaattcccacaatgtggattttctcgagccactattcaaattttaggtcaacaaggagttgatccggaaaaatttgctgcttataatgtattagaagattctgaattacgtgaaggaataaaagaatatagttcatggccaacaattcctcaattatatgttaatggagaatttattggtggttgtgatattatcactagtatggcccaaaatggagaattggcagaattattagaagaactgaatgcattaattcctgaagaaaatgaaccaacaacatctgaagaaaatcaagagacggttcaatcagccaatattaaaccaaatagaaattaa

SEQ ID NO: 6235 - DNA, 2010 bp, Candida albicans
atgtctgcaatgaattatccagatttcttgaattccagcaatcagaacggaggctcgccagcaatgtcgaagggtaatgaccctcgatcacaagatacgcgcgagagcaaacagcaagatttgtacccgtcaggcaataattatatcctgaatgttgcaaccaacaaggactatccacctcagcaacaacaacaacaacaacaacaattcaacaaccttttattaaaaaaattatcagcattagatgatgctctgccgttggatgtgtccagtttttatactaacgcctccctaaacaaagactcgttcaatttgccagctgagttacaaggcggtgtgtcgaatatctcgtctcgtagaccaagttacgccgctgaatcctttactagaaataatttttatcatcaaccaagcttgaatccacaatctcctcaactaggagctcaatcatcgaactttttcaacaatagaaaagacttgtcttcgatagctatgttcaataattatgctaataatcactaccaacacaatggggacgggaactttgatataaatgactcgttttccaacttgaatttaaatgctaaatttaacgatttccaatccaggaggcccagtcagttagtggatttttcattcagcccctttggtgatactagacaacaacaacaacaacagcaacagcaatcacaatcgcaatcgcaatcgcaatcgcaatcacatgtaccaaatcaaaacctacaacaactgcaaccacatttgacaaatgcgggcaatagtgcaccttttattgcctatcagaacaaacaaactatgaatagtgcgcaaaatcaatccatgggtcagggaaatcctatcaaattggaaaacggattaatgttacgagatcaatacattgtggcttctcctgaattgaaaagtttgtatatgaaaaccatcaagtatttccaagatcagagcatcactgctgacattttatctaaattgaataacttgttaactaatccagttataataaagttgattacatttattaagaatttgaataacctcacatttaaccataaaatcctttgtcttgttatcaacaaaaacggaaagtttgatttattgtcttaccctcataattctaatatatttttacaaaagaatgatttggttattgtcgatggtgatcgtggaaaggatttggttatgattgttgaaccgttagtgaatttgaattttgcaatcttattcaactttttaaagaaattggagcatttgaagagtttgacaattattgagggacacgttaccaaaactaacggtggaactcatccaaccactatggatgcatcaacaataattaactcacacctgaacgaggacaatgaattcattataactttacctacaaaacaagtacttcgttttgcgacacctaaagaagttcataaaattagcgggaagtttcttgaggaaaagaaggcatttatcacctgctacaacaaaatcaaagagcttaatcttgattctgatttatcacttataaatgtcgagtaccaatgtgattttaaaaagttgatattttactattttgccggattcaaacgtattgacttccgaggtttgatcaaagaattgtttaaaatttataaaacaagaatttggttatgtgctgtcttgccctataacaaaccagaattgtacatcacaatggataaggaggattctgaaccgaaggttgtacaagtgaataataatttagttcctagagagtatgagttgacgaatgatcaaattttgaatttttctatcaacgaatttgacaatttagccaccccaagctatttccatctgaaaaatgttcaaaatttgataaagcatatgactaatgaaattaagggtcatttctacggtttcaatacagggaaaattgaaggtaattatcaacccgtgaaaacagttgatttatcagatcgtagcagaattttaccaaactttaacccatttggagattttcaataa

SEQ ID NO: 6236 - DNA, 1413 bp, Candida albicans
atgaatatcaattcaactttcatacctgataaaccaggcgatataattattagttattcaattccaggattagatcaaccaattcaaattcctttccattcattagattcatttcaaaccgatcaagctaaaatagctttagtcatggggataactattgggagttgttcaatgacattaatttttttgatttctataatgtataaaactaataaattaacaaatttaaaattaaaattaaaattaaaatatatcttgcaatggataaatcaaaaaatcttcaccaaaaaaaggaatgacaacaaacaacaacaacaacaacaacaacaacaaattgaatcatcatcatataacaatactactactactacgctggggagttataaattatttttattttatcttaattcattgattttattaattggtattattcgatcaggttgttatttaaattataatttaggtccattaaattcacttagttttgtatttactggttggtatgatggatcatcatttatatcatccgatgtaactaatggatttaaatgtattttatatgctttagtggaaatttcattaggtttccaagtttatgtgatgttcaaaacttcaaatttaaaaatttgggggataatggcatcattattatcaattggtttaggattgattgttgttgcctttcaaatcaatttaacaattttatctcatattcgattttcccgggctatatcaactaacagaagtgaagaagaatcatcatcatcattatcatctgattcggttgggtatgtgattaattcaatatggatggatttaccaacaatattattttccattagtattaatataatgacaatattattgattggtaaacttataattgctattagaacaagacgttatttaggattgaaacaatttgatagtttccatattttattaattggtttcagtcaaacattaattattccttcaattattttggtggttcattatttttatttatcacaaaataaagattctttattacaacaaattagtcttttattgattattttaatgttaccattaagttctttatgggctcaaactgctaataatactcataatattaattcatctccaagtttatcattcatatctcgtcatcatctgtctgatagtagtcgtagtggtggttccaatacaattgttagtaatggtggtagtaatggtggtggtggtggtggtgggaatttccctgtttcaggtattgatgcacaattaccacctgatattgaaaaaatcttacatgaagataataattataaattacttaatagtaataatgaaagtgtaaatgatggagatattatcattaatgatgaaggtatgattactaaacaaatcaccatcaaaagagtgtaa

SEQ ID NO: 6237 - DNA, 1056 bp, Candida albicans
atgagaatacttacaaaggcacgagcatttaatcctcatttagcagagatgtttctgaacaagataccctattattacagcagagctcatatggctgatcctgaagcatgtcaaaaaatacttgataaattagatttaaaaagtaaatatgatggttctaaattagatattgtggatgttaatcctggatatggattattttcgaccatgttgaattatgaattaaaaccaagaaatcacattttaattgaaaataaagaacgttgtgttactagtttatcgtcaataatcaataaattagttgaagaaacaggacataattccaattttacattatacaaaaaggattcatttatatgggaaacttataatgatttgattgacaaagataaacttattcaaccacagattaaatcatttgatactcctcatgatgagttattgattttggcaaattggacgggaaacaaagaagaatcggtgcttgcccaatggattaaatgttgtggacatagaaattggttaatgaaatatggtaaagtcagaatggttatatttgctccttcagtatcagcaatgaaatttttgggtgaaccaggatttaagaaaagaagaagaaccgggttaaaacgtgatttatatactgattctagattgattggtgttgtgaattcagaaaaggctccaggattgggatatgatgcaagagttttagttcgtgatcaaccagtattacttgaaccatctagtgctcatagagatgaagattattccgtgattgaaatttctccagggaaatatactgcttcacaaatagaaaatattgaacattttttactggcaatttatttaaccaataagaaattggttgatattcttcctactttagctccaggggctatgtatatggctaaagatttgccagaagaaatgttgcaaaaatcttcttatgagtttacttgtgaagatattattaaattatcagaagcatacgagaattggccattcaaaccatcagtggcagatctatatgattttgatattactttttcataa

SEQ ID NO: 6238 - DNA, 825 bp, Candida albicans
atgtctcaattcggagagttttatgatacatatctggttgagaataaccaacaatatgataccgacttgaataattctacaaatacaccaattgtacaatcaaaacaacgaaatgataatataattccaagtataaatattaaacaggaagatttcgattcagtattgagtggctcattagatgtgaagaagcagttatcactgtcactaaataccgcaggagtaggaattggtagtagctatggaaatggaggaatatccaaaccacaatccagaagaaactctacctatatcaagtctcacgaaggaagtgacaatgaagatgaggacgatcagaatgataaagatgttggcaacgaaaggaaacgtcgggacaacatcaatgataaaatccaagagttgctaacattgataccctcagagtttttccaaagcaacacagataataatactaaaacgggaactaaagtagttaaagagaacagccccgaagacgatgcggtcaaaaactctggtacaaaagacgggaaaccaaacaagggacaaattttaaccaagtctgtggagtatttgcaatatttacagaaccttattgatgaaaataatagaaaagaggttgaactaatcatgcgattaaagaccttagagctcaaggctgccaatagaccgtcagaaaatattccaatcagaatcggttatacgagtgcagaaaaagcacttggagaaattggggttggcccatgttctgaggaatatttcaagaacgtgttaatcaaaagtgcatccacaagtaaatcaggtagacggggaagtacgagtggataa

SEQ ID NO: 6239 - DNA, 3303 bp, Candida albicans
atgtcatcaccatctatactatccaaaaatatagaagacaaatcctcgacaactgaaatagccccacccccaacacaaccacaatcacaaccagttactaccactacaaccacgacaagacgttcaaaaacatttactggatgttttacatgtcgatcacgaaagataaaatgtgatttaacgaaaccacaatgtgagaaatgtactcgagctggtttaatatgtgctggatatgatattaaacttcgatggtcggaccctattcaatatatacaaacgaaaaccggtaacgtaaagagtcaaccaattaaatttaccaataaagatgatgaacaacttgatgaaaataataataatagtaaaaataataataatagttcttctgaatttttccaacgacgaaaagttggatttgttaaatgggatgaaccatatgaaacttatgaagatatggacctggatttatcaatattacacggatcaggagaagatcctatagttaaattactgggagaaactaaattaaagggtccatttggtgtatttaaaggtgaaccatcaccacaacaacaaaataatattatatcacaagagatatcattgaaatctaaaaaacggagattaaataatagtcataacgacactaatgtcattgccactactactactactactactactactggtaccacttctaatgtatcaaatacttatacaaatggctcgagtccattggtccatggacataattttaccaccaccaccactacagaatccaattcacaacctcatggatataatttagaaacagggataccacattctgaccaaccacaagattcacaatggatttctaatgaattaaaagatgcagctcttgtgacagcagcagctttagatactcaatttttagatttaatgtttaattttaatagtaatattccaacagatgatactagtaataatattaataataataccacaacaaatactcatactcatactgataatcaaaccaacaacaacaacaacaatactggtcattcttcaattatggatgaatttaataatcctgattttttgaatttattatttcataaaaatctgcaacttgcaataaccactccgcaaccacatatcggtacaacaacacatacaacaacaccacaattatctcattcaaatagtagtatatcattagccaatattttaaatcaaaatcaaggagcaaataataatagtaactctattcttatggatcctacatattattccaatttttccaattttttctataataatccctatcaatccaatgaaaatttagaaattgatttacatgccaaatcaattgatcatgatcatgaccatgaccatgatgaagatgaagatgacgagagtccagaagaagttgatggtaatgattctaaattattacaatttattatgaaaattgttaaaaatccaacaaatttaccatttgatttatcattaccatcaaattcaaatgaacaacaacaacaacaacaacaacaacaacaacaggaacatcatcatcatcatcaaataggtatacctgtgaatgcccttcaagttcaaccattaacgagatatttattaaattattatgttactaatgtagcagatttaatgacagttattccattgactgaaagtccttggaaaacgatttatttcccaagggcattaatggcattaggtgaattactggcattagggaaaacttcaacggctaaaaatgcattattgaatgctttattagcagtactggcatttaatttacaaagtaaatttcctaaaaattctgaaccaatgagattttatttgaatttaggtattgctttaagaaatcaagctagtttatttattaagcaattattacacaacaaaagaaacaacaaaagaaacaaaaccaatgggattgaatattgtattaatcatgaaaaatataaagatgttttatgtgctgtattaagtatgattagtgttgatttagtatgggggacaatgcaagatacaagaatttatataacttggtgtgggaaagtaattatagcaaaaatgcaaaataaaaaaaaattatcaactaaagcaagtatattacatcgaatatttctgaatttaaaattaattcaagattctacttgtttagatattgatagtattaatgaagatttcgaaactaattattatggaattggaattggaactggaactggtattggttatgatgttagtggtgataaatatgttcaacagaaactagacaattctgacggggatgctactactactactactgcggttgttgatgatcataagaaagttaggaaaaccagaattgattttattgttaataatactttcaccaataaaaaacaaaccaaaacaacaacaacaacaacaactaataaactgaaaagttcaattacaacatcaccttcatttgtcaataaaaaattgattaatactatgaaaaatgatgaaagttttgctactgatgcattatatggattaccttattcattaattgtattatttagtgagacggtagaattattaagaacaaaaatttattatcgtgataatcctaaagctgcagcgagaatagcaatgaaattatcaaatcatgaaaaagaatttaatgatcgaattgaagaattgaatgaaaaattagaaaattggacattagattggcaattatatgaacaacaacaacaacaacaacaaaatatgaccacaaccaaagccaaaaccagatctacaaccccaacctcatccccaacccctactgatggtaaacctgaaaatgaagaacctactactgttggtgatgacaacgacaacgacgacaataatgaatttgatcataaattttattcaccaatgcataaagctacctatcatcatatcatgtcattttatcatgcattaatgatatatttcaatcgattaatcaaacaaatcccggctgagaatttacaaaatcaagttaaaaaaacattacaacatttaaatgctatacaaaaattgattgatgataaagaagccaatataattccattattttggcaaggatttatagctggatgtgaagctattgaaccagatttacaattggcgtttaaacaatggggcgccgatatagcgaaatatttaggtagttattggggggcaagacaaattatgatggaagtttggagaagaaaaagagctaatgaaattaaagatgattggattagtgttattcatgattgggaaatgaatttaatgttagcataa

SEQ ID NO: 6240 - DNA, 2070 bp, Candida albicans
atgtctacttccaagagagcttatagtcgaggtggctgtaaagaatgcaaaagaaggaaaatccgatgtcctgaagataaaccatcctgtgcaacttgtgttagattagggaaagtttgctcgtatcctttgccaggagaacgagttccccgtgtttccatcagagcattagccaataaggaaatcccacttaatgattcaccagaacccaaagcaaaaaaatctaatcccaaaccactaacgattcaaatgtacctggttgatgattttggggctaaaaagaaaaagcggagactaagattggatgatgattatttgaccaacaactttaatactgaaactaattcgcctatatccggaaacaataatggatatttatcaaattccaaatcagcaaataataataacaataatggatcaaatactactgataatttaatgcaacaaataaactcgcaaatgatccctcccattaagcctgcacttagtattacacaagccctggaaagtatgctaagcactacatcgagttcttcattgcttggtggtctatataatgatgacgatttgaacctacttgcatctgacttgaataatatcgttaatgacattatgtttacttcaaatatgccaaacaccaatgatagtttgattgatgacaacttctttagtccgttcaattatccaccacaattgtccgatctcaatgatattccaaaacatatcccattggattatattaaattgaagacagacgatgagaaaaggtacctagcggagttttatcatgagtttgcgtcgcagattttaccatttggcgcgttcgataagatttcaggtacttactacaaccctgtgagagatgtgattttaatctatgctgccaaggaaccatttttattatcagcaatattatctcaaggtgctaaactttctttccaaaaaacatcaaaacagtccgaccatgacaattatgggtcatatttatctagatgtttaagattattgggtcccgcattaagtaaaaatcgtgataaactggtcaaagatgatttaacgtcaaatattgagagtatacttataaccgtactactattaacatcttccaatgccatgacagaaaagttgagttggagaccacatttgaaaggtgcaaaagatattattataaaggcaacacatagtaaaattcgactgtccaaaactttaatattatgcaagatatggtttgctgattttgaaattttggcaggcactagtagtcatttgggtggcacgataaaaaccgattgtgatttagattcagtgataaattttgaagatgaatttgttaaatctgtattggaacaatttggattacttcaaggtgggagtttcaatatcatgagtggatataatatacaaatgatttatttattccgggatttatccaaacttctaaaccgcaaacgagaaatgggggaacaatttgtccccaatcaatcccttgagtatattcgtttaatttcgggattttatgaacattatgggaaagtgtatatcgatagaaaatgtctattaccaggaccaatttccaccccactaacagagttatataatcttgtcgattccgtgcccacaacaagtgggaacacactttatattagctggatggatatttctcaacaagcgtatgctttagctggtttaataactgtgtttacttcaatattattagatcctcctgatttaccacatattcaagatttaaattccaaactagttgatttgataaagtttgtcgaacaaagtgtgaactcttttacaatgaaattcccaaatggatttctgatgattcaatggcccattacggttgcaggaataaattgtactatcaagagtcaacagccagtgattgggaaatttttcaaaatatgtattgagttaggatcagtcagtgctgaaatcactttgaaacggataaagaaaatatgggaattgcgtgaaaagggtgaggagtattatgatcttcatattaagcatgaaaatggtgaaattgacggaattcatatcgataatgttgcctactaa

SEQ ID NO: 6241 - DNA, 1146 bp, Candida albicans
atgtccggcacgctaccttttatagaagattcaacaggggagaaattcaaaagacaaaaatacaaagagcaaagctttgttgaactgaaagagcgtggtagcagagatacaaaagagcatacacctactacagcattatcatatgatgaggtcaatgacgacctcgatgagttggttgcattgagaggagagggaagatattttggtgttaccgatccagatgacgaatccggaatatcgaggcaatcgttgggcccactatgtgcaaattgttacaaaagaggacacacaagagccaaatgtacagtggtcatttgtcataaatgtggagctatcgatgatcattatgaaagtcaatgtcccactactataatatgtagcaggtgtggtgaaaagggacacattgtgctgcaatgtaaaagcaagatccgaaagagacaatactgtcgaacttgtgactcttttaaacatggtgacgagaactgtccaagcatttggagaagttatataacgaaactgccgagccaaggggaaaatgaggaaagctcagttttaccaagaatttactgttacaactgtgcatcaaatgagcattttggtgatgaatgtgataaaccgagatcctccagaatacctaattttggtagtgcatttagtggaaacaatttacccaaaaaatacagaaacctttatttcaaaagactcagagctgccagcaacagtcggataggagatgaagaatacagaccaacaacatcaacaagagattacacgagtaacttcacaccatcaagcaggtacgagggatttggcagtcaagggttttcacgtaacggtggcgatcatccctcgaggtctggcttcttcccaaagagacaatcaagtggatttgggtccagtaacggatttctgagaacgccaaaaggcccaagtcaggataacagaagtaaaggtaaatttaatctgaatgcgtacggctccaagtcgagttataatcaaccaacaagaacaggtatgatcaaccaaaatgggtctcaagatcaaagaggtatatatagaaatagtacaagaggcgggccacagcctactagatcagggttaattgccaatagaaaatccaagaattttaagaaaatgaagtattga

SEQ ID NO: 6242 - DNA, 1794 bp, Candida albicans
atgactacaccactatcgagttattcaactaccgttaccaatcaccatcctacatttagttttgaaagtctaaactcaatatctagtaacaattcaacaagaaataatcaatcgaatagtgtaaacagtttattatatttcaattccagtggttcaagtatggtgtcatcatcgtcagatgctgcgcccacgagtatttccacaaccacgacttcaacaacttccatgacagatgcaagtgccaatgctgacaatcagcaagtgtacaccatcactaaggaagacagtattaatgatatcaatcaaaaggagcaaaactcatttagcatacaaccaaatcaaacaccaacaatgttaccaacctcatcttacaccttacaaagaccaccgggtttgcacgagtacacgtcatcgatatcttcaatttcatcaacaagttccaactccacatcaacaccagtatcccctgctttaataaattactcaccaaagcattctcgaaaacccaattctttgaacttgaaccgaaatatgaaaaatctatcattaaacttgcatgactcaacaaacggttacactagtcctttacccaaatcaacaaattcaaatcaatcaagaggtaatttcatcatggattcacccagcaaaaaaagtactcctgttaatcgtataggcaacaataatggaaatgattacataaatgctaccttattgcaaaccccatcgataacgcaaacgccaactatgccacccccgttatcacttgctcaagggccgcctagtagtgtaggatctgaatcagtatataagttcccaccaataagtaatgcttgcttgaactattcagctggtgattctgatagtgaagttgaatcaatgtctatgaaacaatcagcaaagaacaccattataccgccaatggctccaccatttgctttgcagtcaaaatcatctccactttccactcctccgagattacacagtccattgggtgtagacagaggtttacctatatcaatgtctcctatacaatcatcgctcaatcaaaagttcaacaatatagcactacaaacacctttgaactcttcattcctgataaataatgatgaggcaacaaatttcaacaacaaaaataacaaaaacaataataacaatagtactgccactaccactatcactaatactatcttatcaacaccacaaaacgtgagatacaattccaagaaatttcaccctcctgaagaattacaagaactgacatcaataaatgcatatccaaatgggccaaaaaatgtgttgaacaatttaatttatttgtattcagatccagttcaagggaaaatagatatcaataagtttgatttggtgatcaatgtggccaaagaatgtgacaacatgtctctacagtatatgaatcaagttcccaatcaaagggaatatgtgtacattccatggtcacataattcgaacatctcaaaggatttgtttcaaataaccaacaagattgatcaatttttcactaatggacgtaaaatattgattcattgtcaatgtggagtatcgcgatcagcatgtgttgttgtagcattttatatgaagaaattccaattgggagttaatgaagcttatgaattattaaagaatggtgatcaaaaatatattgatgcctgtgatagaatatgtcctaatatgaatttaattttcgaattgatggaatttggtgataaattgaataacaatgaaataagcacccaacaactattaatgaatagtccacctactattaatttatag

SEQ ID NO: 6243 - DNA, 2307 bp, Candida albicans
atgacattagggttcgataaattcataagcaaggtcagcactcatagacgtcaatctgaaccatcaatcttggaaatcgcagccaccaattctcaaaataaatcgagaaggctaagtatggataatggtcattgttatgttcgtgaatcaactaataatcatcatcatttaaataccgtcgttgataatttacgacagcgtgcgggatcgttttcatttatttcacatcaccataatcaccatcagaatagtcacgataattatactgtcgatccccttacatcaaacggagcacgaatttcccgatcacgttcacgttccaaatcagttgggcacggagaagcaatatcaccagcgtatttttccaagaataaaaccaaagatttagtgaaacaggaaacagcacatatcattctgaagaaattactcaacatgttacaagatttggatttacaaaaccctattgcattgaaaacaatatcacaaggttcagaatcaaagttttgtaaaatctacgtgtctaacactaataattgtatttacttaccagcagcaagttcaacaagtttcacttatgaagatgatgaaaatggcggcgttataattgctgaagatagaaatgatgaaatgccaacagcagttaataacaatactttgtcaatggatagtataaatcattcagagactgatttcctggattctccaccacctccagatttattttctaaaatgaaatcattccattcaccaaattacttgacttcaaaaatcgattctgaatgtccaattccacatacatttgctgtcattgttgagttgaccaaggactctttgattattaaagatcttcatttccaatttcagtcattaactaccattttatggccaactggggatgcatataatcggactcatgccaaggagaaatttgccattgggaatatggaatggcgtacatctttaagcgacgccgactattatatcaatagttctaattccaacgatgttaagctgaaaaacttgggtcctgaagatcttattaatcgaactagagaatacaaattaatcgatattgaagaaccaaacaattcatcaaacagtttactggatgatgacatggatattaataatattacgtcgccattatcaacgtcaccaacatcaagttcaacttcaacaaattcaacatccaactcattgggttcagattcatataaagctggtctttatgtatttttattaccaattttattaccagaacatattcctgcttccattgtttctattaatggttcattagctcatacattactggttgaatgcaataaatatactgataagttgaatcggaaatcaaaagtatcagcatcgtacaatttacctatggtccgtactccaccaaacattggtaattccattgctgataagccaccttatgttaataggatttggaatgataccgtacattatattataactttcccccgcaaatatgttactttgggttgtgaacacatgataaatgtgaaattactgcccatggtgaaagatgtggttatcaagcgtattaaatttaatgtattggagagaataacttatgtttccaagaatttatcacgagaatatgattatgatagtgaagacccctattgtattcatccagtttctaaagaaaataaagtacgtgaacgtgttgtgtcgttatatgaattgaaaacgaaggcaaaacaatcttctggtggacatcttgaagcttataaacaagaagttatgaaatgtccggaaaataaccttttattttcttgttatgaggttgaaaatgataataataacggcaacggcaacaagaacgttaaacaaaagaataaagatcaaccaatgattgctacacctttagatatcaatgtttctttaccatttttaactactatgtctgatagtttaattatgacatcagccatagaagaagaaggttcagatctgcctcatacatcaagaagagggtcggcagtcagtatgactgataataatactaccccaagtatcaacaataaccctttatttccatttttgggagcagtggaaactaatggtgctagtataaatgaaattggtgatcatacattattccctgattctaattttcgacatattgaaattaaacatcgattacaagttacatttaggatttctaaaccggatctggataataaaatgcatcattatgaagtggttattgatacccccatcgttttacttagttcaaaatgtcaagaagattctcctcctccttatagttctgtatag

SEQ ID NO: 6244 - DNA, 1755 bp, Candida albicans
atgtcagtagcaataacatccaataacaataaacaaccacaaccacaaccacaaccacatctaaaagtggtgaataataattcaacttttaatctatatacttggttaagatcagtgtttcaatattgtatatcattaatcatttcatatacttccaactggttattagtgaataatgacaacaacaacaacaacatcaacatcaactacaaaagtaataacaatgacaataacaatgctagcacatcattacaaccaaaaatatctaatgtcaaagccgaatcaatgaaaatattccctgatttacaaaagagcaatttcacaacttattatactacagaaaaaccattacatcaagatgttttaaaaccagtgatttgttcaactggtattactagtagaattttaccttataccaatgaaaaaggtgaattggaatggaaatttactgaagtacaggggaaagaattggatgaattcaaaatgcatccacaacaacaacaacaacaacaagaagttaaacaagaattatcccctgccgaaagtaatgaaagtaatgaaagtcttgccaaagatagttcaacaactccagctagtataagtgattctccactgcattctgaaactgaatcaacagtatcttctactattattgccaattctaatcaaattttcaaatgtcctagttgtgatgccgagtttagagttcgtggttatttaacaagacatatgaagaaacattctacgaaaaaagcttatacatgtccattccatgataaaagtatttatgttgatgaaaataatataactcataaatgtcattctagtggagggttttccagaagagatacttataaaacccatcttaaactgcgtcatttcaattatgcaaaaccaataaaatcagcagaacgttcaaaagtccctggacaatgtgccatgtgtggtgaacattttaatagtgccgaaatatggtgtgagattcatgttgaaggtggtgaatgtaaatttttacccatgggatttaaaggtaaatcaagaatcaagaatagattaaagaaacaaatacagaaaaacaaaatgattgatcctgaattggtaccgtttgctagtaaagttttagaagaagttgaacaagaacgacaaaagaagaagaattatagaactactggtactggtagtgaatcatcaatacaatctcaagagagtgaaagttcaataaattcaacacctttatcaatgcaaatttcagcaccagtaccgatgccagtatcaattcaacaacaacaccaacaccaacaccaacatcatcatcatgtgcaaaatcaacatcaacaacatgtaaatcaacaacaatcaattgccactccagcatcgatatattcatcttcagcgtcgtctacatcatcatatgaatccacccattcaccatatactccacaatcatctcgttctccattgagtcatatgtataatccccaacaaccaccttatttcaatcaaattgctcaagctcatcaacaagatggtcaaaagaatcaagtcaaagatgattatgacgatgaatattgtcttgatgttgatcaattgaatactacatttgttaatgaaactgttgccaattatttacaaattcatgatttccattcaatgaatcaatatcaacctggtcaacagcaacaacaacaacaacagcagcagcagcagcagcaacaacgacaacatcaacaacaacaaccatcaatgtatttctga

SEQ ID NO: 6245 - DNA, 402 bp, Candida albicans
atgctattttctttttttataggaggtaatttccgtacttggactccaacaccacctgaaagaggatcattcccattagatcatgatggtgaatgtaaagaatatatgacgaaatatttaacttgtatgaaatttactgagaataaaaatgctcctaattgtcgaatattagctaaacaatatttaaaatgtcgaatggataatcaattaatggaaaaatctgattgggattctttaggattagttaatttacctggtgaaaatgatgttgaattagatcatcatcatcatcttaataacaataatactaaggcagatggtaaaagtggtagtagtaatagcaatcagaatttggctaatactactaacaataatactgggacaagttccggtacaaagtaa

SEQ ID NO: 6246 - DNA, 1116 bp, Candida albicans
atggccaaaagaaaagcaacagaatcggaacctttaccgactaagaagccaacaaaatctgtttctgaaacgacaatctcaatatgtataccttcaacagtaatttccctgaagaatgcttataatttacaacaaataaccaatatcatatatcaaattgctaaagcctgtaccatttataaagttgccgaaatcattgtatttgatgtgccacaatcaaacaatgataaagaagacgataaactgactgttgtcgttggaagcaaggttaaatttgttgaggatgaacccgaaaagactcttgctaatccgagtaaaaaatccaatgttaatggtgataaagtatctccttcattattagttgccagtttattgcaatttttcatcacccctccatacctcgtgaagacaatgttttccagtcatttaaattccaaattcaaaaacatccttcccaaattcacgtatgcttttaaattaccaaaaataactactttaccattcatgcaaaataatcaagtatataaggatttcaaagaaggtatgataatacccagagaaacaccattgatgaaaaagaaaaacaaaaagaccaagtccgaccacaaaatcactgttagtaaatatgtcaatattggagagaaagaagcattgaaattaaacattaaacgagaaatccccatatattctcgtgtaacagttgacttgaaaaacaaaacagtcgtctccccattacaagcctatggggttgttggtcataaagctgcttttggttatcatgtaagaatggccagtgaatttaacaaaatattcactcaatcaccaatatctgatggttattcaagtaccatctatgtaaactgtgatgattattttggcaacaacaataaaatatcggagttagataatctactgacattcaaagaggccacagggaatgtattgatggtgttggggaactataaagatttacaagcaggatttaaagctgacacttcaaacgtatttgaaaatattgacagtgttgcccatttatttgattctaagttgaatatcccagatggttgtagaatagaagatgccatattaattagtttagctaaagttatagagtag

SEQ ID NO: 6247 - DNA, 987 bp, Candida albicans
atgagtgaagatgatgaatatataaaggcattggagatacaaagaagaaactttgaagcccaatttgggtctattgaggatatgggatttgaagacaaatcaaagactcaagtagaattggaagatgaagacgaacgttcaagccaagattcaccagaccaatcatcgggagaagacgaagaagattcgaaatttgatgaaatcgattctgattctaatgaagaggaaatggactttttaggcgatgatgaagagcaggatgatatccccaaacctaaagtgtttaaactcaacgatagttctaatacaccacttccagttgtttcaaaacaagatcgaaagctattaaaatcaggacgagctccaacgttgttagaaatatcgaaaaaagaaaaactcgctgccaaacaacagtccaaacaacaatctgcgaagtctaaagcggaagatgaggaaaaccttgccaacgacctcaaactacaaagattgttaaaggaatcacatatcttggccaatacattagaatattctggtgcagacttgactttgcaaacgattgattttgacgatccaacgggtaaagcacgtagaagagcgttggattcgagaattcgtgagttggcaagtacaaattcaagaactggaggattacccaagaaattagaaaaaatgcctatggctatgcgaaaggggatgattaaaaaacgtgacgagagaataaagaaatatgaacaagacgcaagagatgctggaatagtattatccaaagttagaaaaggagagttgcgtgatttggatgctggaagaggttcgacttcatctagtgatagattgggtaccggtaagaaaattgataagagaattagggatagaggtttgaaaattaatggtattggtagatctactagaaacgggttagttatatctcagggggaaatagatagagtaaatcgtggtggtaaaaaggggttcaggaaaagaagataa

SEQ ID NO: 6248 - DNA, 3441 bp, Candida albicans
atgttgagacttcaagaagttcatatacgaaaatgttatgggtctaaaataatactaaaacataatcttcatatatcttctactttattatataataaaccttcgattccatcaagtcgacgatcaagactgaaacaaaagttcacatctaaatctaaatatgatgattcatttttcaaaaatatattccaagaaaataaggataataaatcgaaaagtattgaaacccaatctcaagatactcaccaagaagttaaaacttcaggattggagaaaattcaaaatcttgttaaatccaaagttaaatcacgtagtatatttgattcttatgctaatttaagaatagatataactaaaccaaatgatgaattagtacgatcaataattaaaaataccaaaactatgaataagaaaagatttactgatcctgctacttcttggttaagtaatttctcccaaaaggaaatacaagaattacaagattttttaaataatgatttacctattaatggaacaattaatgggaaaactatggaaactccagttaaaattggtgatttagtaactttaggatcagaaagtttacgtttatatttagttacatccgtacctaaaacttttaattcaagaatttgtacttttttaagtgatagaggtgaaattatgtttgctccctttagtactattggttatcgattttccggattaatacctgataaatatcataaaaatattgaaaaatttgttgtattggaacaaaaatatttaaatattccgcctattggtatacctgatgcagttttttcaaaatcaaattcagctttacctaaagaacttcaagatcgggaaaatggaacaaagaaagtggtgactgaagaaaaagaagaggttgtagatgttgatggtaatggtgatcctgatgagtcggcatatttggatccaaatgattttattgtccaacaggcatcttcacaattattatctaatactgatgtacaaacatttattgtaccaaccacagttcgacaaatatatgttccagcattattgcaaatttctaacgaagcattttggaaaatgggaccaatgtatcggaaattagaagaattacatagaagtttacaagttgatgacaataatggagaattcaatactccaagaacagtatcaatatttgaaatattgagcaaactcaaacagccaacatctgaacaatcaacatcgactataaaattaggtaaatcaccaactaatctgatagattatgatcaacgacaatataagatatcagatgttatggcagtattatcattattgaaaaagcaaagtcatttgtggacaattttaccatgtaagctgtcattcacccctacaaaagtaacaatatggccgcttgcccaaactaaagaagaagaaagaacggttgaatatttaaataatgatgatggattaactgacattactaaatattgtggtcaagttgctttaggtcaaaaaccagccaatactaaaccaatattttataataatggtgagaaaatgttaagaggatatgtgaatggggaatataaagatgatgcatcaatatctactactttagtatcacttttacggaaagtagataaatattttgttgaattgggaataccacttaaagaagaagcttataagaatgaatattcatatggtaaagcttatgatttgctcactaaattaaacaatgatgttgtggtcaatccattattatggtctgaacaagctaatttaccaactgaagaaaatgcatcggccaatactttgacaaaacaaaaattttataattatatggatcaagaacttgccaatgaaacccctaatgaaattttacaaaatactattgccaatgaaatctataatgaagatccattacaacatttaagacaagatatgagagaaatccctatatattgtattgatgatccaacggcccatgaaattgatgatggtatttctatacatgaagatcaacaagattatattgtttccattcatgttgctgaacccagttcatatattaaacctaattcaataataagttctttggcatttgaaaaaacttcaactagttatatgccagacactgctttccccttgttacctaaattagtatcagatattgctggattaggaatccctgacaaggatactcgaacatttgtgattcaatatcgagttgataagaaaactgtcgatgaatatatttccaataaagtgaacgataaaaattataaagttgatcaactgttattagatcaaataatttctcaaatcaacgaaagtagcaatattgtttttgccacagtttctaattttcgacaagggttcacttatgataaagtcaatgaagtattgaatgatgaaataaaaatcaatcaatataaatcaatgggtcaatccaatgatcttgatttcaataatttgataaaacttcaatatatatcttcattactttgggaaattaggaaatctaatcatgcatatacaaatagtggtaatactaaattaatggtcaaaaaaaataacactagcaatacaaattgcgatactgaattcatttatgatgcaaatgaattacaaatgaaacttgccaattcaaataatacagtttcaattggatttgctaatttagaaagtgcatcaattaaattagttacagaaaatatgatcattgccaattatttaacagcaagatttgccaccactaacaatattaaaatattatatcgataccttgatcctaaatttaatgatgaattgttatccgaatatcaaaaattaatgaaattatcagatactaataacaatacgtcaatccccacggatcaattaacacaaatgttcccatttttcactagaggtttagtcactgataaacctcaaaaacatttacttatgggattatcaatgtattctaatataacatcaccattaagaagatatatcgatttagtgaatcaatggaaaattcaagatttctttttaggtaaacaacaacaacagcaacaacaatctagaatagatgataaaaatattcctgctattgccagttatttaaatggtcaaggtgaaatcattagaaatattcaactgagagcaaatactttttggcaagggttatttttaagaaattatcaagatttgaaaaacaactacaaccacaaccacaaccacaacccaattgattttaaattgaaattaattactaatccaacaatgggtcctacagttggtgtttatataccaaattttagatttattaatgctcatgttgaagtatcatcagaaatgttggaagatttcaaactgggtcaattgaaaattggtggattaattgattctaataaattacatttaaaacaagttgatttcttggaaaatgaagtgatatttgaatataaatag

SEQ ID NO: 6249 - DNA, 1389 bp, Candida albicans
atgacgtcaaaaagtctgtcctggaaggcattactaaaaaattgggaattcaaggttgctgcatttataggaatttattttcttatttcacatgttgtacttgaaactacagatgtagtaaacgaaaaggggttaaaatctcatcttaaagttttaccagaagaagtcattgactactacggaaaacagccattttcaaacgtggacaagtatgcgtacatgcagtatgcaaccaactatgactatttgaatcttgcaataattaatttcattcacttgcgtaaagcaaacaccaaaatacccaacttggttattatttatgatgaagtcctacattactatgctagtgataaatggagtgagttgtaccaagtggcaaaccaatacaaaatcaccttaaaagctgcacctttgataaaagcaagttatcaagatgattctaattgggcagcttcgtttaccaaattccacatcttcaatcaagttgagtatgatagaattgtattttttgattctgattcaatgcttgttgatattccaaatgaaattgattttgacaatatggaaagcagattcaatcacattgacgagttgtttaaaattccacaggaattatcgtttgccctgccccaggcctattggctaaataatgttgttgaaggtaaaagcccaagacctagaaagaatgttgaaataccaaataaaaagcgatattcactcaggatgaaaaagctcgttaatgatttgagcatatatcaggatttcaatttgttgcccctgctaatttatgaaaatcattatttcgataatgctaatcattttttcgctaatcatataatggtgataactccatcaaagaataccttccaagagttgatgaggtatattcacaatccatggtggtggtctataacgaatcggggtagcttaagaaagccaaatgattatgatatggagatattaaacaaatatttgaataatgagctacaacgcaagagaataaatgtggggatcttacctcatcgggtgtatggtgttttaactggggaatttggtgaagaatggcacgagcggtttgtagtagaaccccaatatttaccattcataaataaaaaatcaaataaaggctggctgccattagaattttttaagaaaatcaaagtggtacatttttcagatagccctatacctaaaccatgggaagaggaaaataatgaagaacattacaacatcaaaaaaatatattgtgataaaggcgatatggaaaagttccacaaagactatccggtgtacaaacctcgattaactgatgattgtgatagtgttctgatatggaattggtttagagaacaattctacaaagaaagactgggatattggtttgcttag

SEQ ID NO: 6250 - DNA, 432 bp, Candida albicans
atggtgttacctataattgttggattaggggccacaatagtggcgttaactgccaaagcaacaatcaccgcatataaacaatatcttcatctaacacctgcaatgatagccacgctcaataacatcaaactaattaatttagaatcttcaatgtctataaacaaatctgatccacgatatgcacattataagtatttacgactgaaatatcctaatcgaccgtttcttgatcccatgactgaacaagaagcattattgattttaggtattgaaggcaatgatattttaaatcttgataaaaaaatgattcgagatcgatatagaaaattaatgattttgaatcatccagataaaaatggtagtcaatatataagtcaacgtataaacgaagctaaagatatacttgataagagttatatggtcaacaaatag

SEQ ID NO: 6251 - DNA, 606 bp, Candida albicans
atggcgggaaagaaaaagtctaagtctgaagctttaccattagatttagacaatattaaaccaatggatcatttacaaccggtccctaaaacaagatcatcatcaattacctcgattgaaagtgctgatgaaccaggtactatgaaacaagtgttgttaccacctacaatcaaagaatttgatgaattggaacaatttgaatcgtttgttcgtgatgaaacttgggataatgattttgattatttccatggtagattacattattatccaccatttgttatgaagagttgtcaaaataatcttgaaaaaatcaaacctaccatgaataaaaactccaagaaatttagacgtgatttacaacatcatattcaaaaacatttaattaaagatttagaaaaatgttgtggttacgaattgaattttggtaaaggagaagttgttgaaactgataataaagttacttggaaatttaaagatgaaactgatcatggttttagtaaagaagaagaagatatgtatgatagacattggagattggaattggatgtttcttgtacaaatgaatcagctatggttgatgttgaatataaatccattccaatgtaa

SEQ ID NO: 6252 - DNA, 2097 bp, Candida albicans
atgaaagacattaatgccactgagaacaacttggcatctaaattccaacgattcaatgacaagacacttgaaaatttaattaatcagatttctaagatctattcatcaaacaatctactcgtgttggatgctgtgttatccccactaataaacagcttaacaaattttacgaaactaaaagaattaggcaaatttcaaaatatagtgtggttggataatgagttagtaagcattgggtcgagtgtattagccaagtatgcgagtttgattgttgttgtaccgacaagttcattggagaacatcaatatattgaataaattgatacattcacaaccagatttgcatagtttaaaacttaatattattgtgaaggatttaaaaatgagtttcatgtatcaaattaacaaagttttcaacggaattgtcaattttgaaagtatattatctccagagaaatatcaaaaacctatatctgtcacatctcgcataaaaatttataattggaagacttcacccatatacacagatgaaattttggttaccgaaatcaataaatttaatggaattgacgattattttagtaaaccacttaaacaagtgaatcagttaagtgaagctttaatgcaattgctttttatgggaatacaaaatgggaagcacgatcatttattcaaattacgaaacatctacggtaaaggaaatcactccaaacttttaatagaccagttgcagaattcaaaaataccagagtttatgaacgagaatatgacgaccttagaaattgacttttattcagatgtacttcacagtaataccgacttggttgttttggaacgaaatctcgattttacttcttgtatattcaatcaattaaactaccatgggataatagatgatatgtttagcattaagtttgaaaatattgagcaattactgagcaacgaaatcagcaagagtttagcgaatgacaagttgtattcacaagacttgaaacacttgaatttttcgtcaattggattgagactaaacaaattggcaaagtatatccaacaacaattcaaaacctcatctgctcaaaaaaattcaagctcatcggaaccaaacataagtgatataaaacaattagtgtccaaccttggtacgttatccatacaacaagaattggtgaaaaaacataccataatcggggaggaagtgatggaaaagataaataaaaattacgaacagtttcttacttttcaaaatgatatttttgagatggactacaaatcccaagttgccaagcttagagagtttgttaattgtaattatccgatcgagtttgttctttcagcaattctattaattggatatttgaatgatgggatttcaaataaagaaattgattggctttctctagaaatgcaagacaattacggacttgaggctgttttcactttggaaaaattgatcaagtttaaaatgattcgagtcattcatggatcctcagtagactttttcagtagcttggggtttaccagccaaaagaaaaagcccacaacccacagccagtctgaatttgaagatgacaaaaatgttgggatcagtgggagtggagatgtcttcagaaacaactacaccttgatcaataaattttggaacttacacccgttggacgacgacgaatccttatcacaaaacttgacagagtcgggcagtaatgaactgacaaacttgctagatttgtattcaaacccatcttttacattaccgggcaacacggttccacttatttatcgttttgtcgaggcattgtatttcagagatttcttgaaacataaaccaataaataacctcaagagacgtccaaattgggacaatttgggtgtcaatacaatgtttgctggcaaaaccattgatttgaatttggataacgtgaatgacgatagatccaagtacttggtaattgtcgtcattggaggtgtgactcgaagtgaactaacctgtttcaaatacttacaggagaggtttaggaaacaaggaaaaacaaaagagattattatagtatccaatggaatcgttaatagtagtaaactaatgcagtttatgtcgaactga

SEQ ID NO: 6253 - DNA, 531 bp, Candida albicans
atgggaagatatagtgttaaaagatataaaaccaaaagaagaaccagagatcttgatcttatatataatgatttatctagtcccgaatcaataaataaattaaagaatcaaccattagatgaattaaaacctggattaggtcaatattattgtatacaatgtgccaaatattttgaaaatcaaataagtttggatcgtcatactaaatcaaaaatacataaacgaagagttaaatcattgaatgaaagaccatatactccattagaagcagaagctgctgctggagtaaatatggagaaatttattgctagtgtggaaaaatataaacaattggaaaatgataaacaagaaaataaacatgaatatgataaattaataaatcaaaagaaagataatttagatgctataataactggtataccttctgaagaatttcaacaacaacagcaacaacaacagcaagaagaactacaagatgctaatcaaaggacagttagtaatgatcaagaagaggttatgatgattgattag

SEQ ID NO: 6254 - DNA, 996 bp, Candida albicans
atggcaacactaaagaaaaaagacaagaaagcatcagcttgctttacttcttcaaccaccacacctttaaactattctaatcctgtacgacttgcatttttaggaggtccaaaatcaggcaaaacgtcaactatatccaagctaactgcaggaaacttccgagacacgtattatccaactcatcagatacatccaattcttttcaattacaaaccttccaatgaagcttcaaaagtcttaactgaatttgtgaaaggaaatgaagacactattcttagtccaatgttaaactcaaatgagctcgttcccaccaatgagtattacaaagttggtaataatgatgttggtccgatcttggttgaattgatagatacaccaagctttaacccacaacaagttgttccattcttggaagcatcattgtataccaatttagataaagaaattttgggaaaccttgccaacgaacctcgtaaaccagtatccaccaatccgttactagttgcaagtggagcaagtgaattgaatggtaacataaatggttatttttttgtctatagtgcagttccaggctcgtcacctccgggatatgatgaagatctttcaaactttaccggcgataacacgttcagtttattaccggttatcaaaggggcattagaggatgcctggcaggagtataacgaatatatcaggaaaaagaatgcagagaaagaacaagatttattttcttttaaagtggctcttcgaaatctactaaaagaacctagtagtaacaacagtgataagaaaggtgttgaaaccaaagattattcgcctccaatttggattctatgtacacacaaagacagcaatttagcatcgccaaaattaatagaacaagggaaacagttggctcgtgaatggaactgtgggtttcttgcaatggataatctggaagataacatagatattttattgacattaatgattagagacattatagaaagaaagtaa

SEQ ID NO: 6255 - DNA, 876 bp, Candida albicans
atgaataagttttcgataataactagacctttgtttagatctagtcgtcacataggagtttttgttccaatacagagatttttttcaaccacatctcctagactttctaatttacttggtgaagtgacaaagatcgattccgaaccaccaatcacaaccaccagcaaatccaccaccacatcatcgtcagaagataataaagatatttccaaagtcactccagaaaatgatgaagaattaattgaatatcatgcgaaaaatgctgaatccaaacaattcaaaattgaaaaatacattcatccattaaaattacaattatataatgaaaatgtatctcaatttggatttttcaaaaatggacaaatcatgaatcataatggtaaaaaattacgtttcacattaacaccacaagaaattgatattttggaaccatctatttatttaaccagttatcgtattaaatcatctatgaaaaaagccactattgttaatcgtatggttcgtaaattcaatgttaaattggccatcaatcaattacatttcaaccataagaagatatctacagaattagaacaattattgaaaagagggttagaacaagctaaacaattagaattgaatgaagatgaattatatattgatagaatttggattggtagtgatggtaaatggaggaaaagattagatccaaaaggtagaggtagaatggggatcattgctcatagatatgttcatttgaaatgtattttgaaaactaatcaaaccaaattaagattggattgggagaagcaacaaaaggaattgaaaagtaaaccaagaatgtttttgaatgatgaacctttaaatcttaaagttagaccttggtataagtggtaa

SEQ ID NO: 6256 - DNA, 1692 bp, Candida albicans
atgagtacaacatttagatattttgctgcttctgatttccatcaaccattaggttctaacaagaataatgtctttgaaagaaataattcaactgtttcttctactaattcattgatgtcaaacaattccgatactaatactgctgctactgctgctactagtggatccactactaataatgtcaaacgtatgcattcatctttgattagtaaatataatagtaatcgttccacaatttttacaaatgatactgattcaatatctagttccatgtcgtatgacaacaattccacacttgctagctcagtatcacccaattctccagcaaatcatcattcaagcaaacatcaacaccaattaccttcttatatgatgaataaatctcctcaatatattcatcaatcaacatctcgtcatagtaatcttaacaacactaataatcttcttcacaatactcatagtaatcatagtcagcatagtcaacatcaacatattttgaatgaagatttagtgacattgaatagttctatggataatttagaagatggattttataaattgattagattggatacaagaatatcatttgaatcatattatgttgaacaaaaacaagaacaatataaagtcaaattgcaattaaataaacatcaaattgatttacttagatatacctggaatcaaatgttattagaagaaagtaatgaagatgaaatttttgatgatggtggtattgataattatgatcttgatgaagaaggcaatattgaagaaaatattaatgtttattatgccaataatgatagtattcctggtgctttccccactggttacaataatagtcgaagaagaatcattaaaagaaaatcgtctcgtaatgttaatggtagtggaagcacaaatacaaatactatgacgagacttgattctaccactattgcatcatcattattttgtcgacaattatatttcaatttattaagtaaagatccaacattagaaaaaatgtttccatcgattaaacatcaagcagctaatatggccgggatactttcattaacgatatcacaattggaaaatttatcaattttagatgaatatttagctaaattgggtaaattacattcaagagttttaaatattgaagaagctcattttaaattgatgggggaagcatttgttcaaacttttcaagaaagatttggatcaaaatttactaaagaattggaaaatttatggatcaaattatatttatatattgctaatactttattacaaactgggattgatccagtattaaaattgactcgttatgaactgaatggcagttttacaacttcaactaatattgatttgactaatggtgatagtatacttcttgatgatactgatactgataatgataatgtcagtgttagtaatattctagatccaaaacatcaacaacaacaatacggtggttcttcatttaatcaagatgataatgataacaacaacgatggtggtgttcatccatctacaaatactgttgtgctcacaaaatcaaatatactgatcattgaaagtgtagcaccacatcatcaacaacaaaagaatagttctggttcctctgctgccactcctacagctccttcaaagaagagtaaattcagtattagaaaaaagaaaaaggaaaattgtgtggttatgtag

SEQ ID NO: 6257 - DNA, 384 bp, Candida albicans
atggttcaatctatgacatctgtcgttaaggcagctaatttcattttagcaagaccaacattatcaaaaatcattacaccacttgctcaaaaattcactgcttatgcagggtatagagaaatgggattaaaattcaatgatttacttcttgaagaaaccccaattatgcaaactgctattaaaagattaccttcagaattaaattattcaagaaattttagaattcttactgctcatcaattagctttatctcatcaattattaccagctgaaaaagctgttaaacctgaagaagatgataattatttgattccttatattttagaagctgaaaaggaagcttttgaaaaagctgaattagataatattgaagttaaagcgtaa

SEQ ID NO: 6258 - DNA, 933 bp, Candida albicans
atgagcatctactcaagatccgtgtcactagtcaggtgctactcttcggctcagacagcgatgaagaaacccttccaaggtccactctttcttaatccacatgcttggaaaggattaccagctgatcaagtgtttgaattacataaaatcagaaaggaatatatgggagatgcatacaatccaactgatgaagaaagaacagcaattttgtctacaatatcgtctttggttcctaataaacctcccttagattatgctttcgagattgaaaatttcaaagaacgattaatgaataacactcctatgcaagacagaggaaaaccacaaaagttgagcaatcagtatgtgatcaattctggtgcggttcctcatcaaagaagaagaatagaacaattaacgagaaaaattgcttatgaggcaccattgttagcaaaatatagacaaccatacacaccacgaccaagaacagaagcaccgattagattgacttacaattctgactttacagatgatacttcaagcgcacataacagaaaagtggcattaaaagtgagtttgcgtgatttaaacttgaatccaaagcaacagcataaatttaaagtgttggcaggtgacaagtttaatcatgatgaagatacatttcagttgaaaagtgaaagatatccagaggctgcacaaaatgtcaattggttggttgacactttcaataagttactcacagaagccaaagatttgtccaaggatgactacagcgatataccattgtcaaagagtcatatgaaaatcttggcaaagaaagctgttccatccttcccagaacactggaagaaaccagaggatgcaccaattaaaagacatgacattgtaaagaaattagttgctgctactgagaaggcaaaggataacgaatatattcgaaaaatttccccatga

SEQ ID NO: 6259 - DNA, 783 bp, Candida albicans
atgatattttcgaggtattttattcctattatactcacacttttaacatcatcaccattattcgtcgatgctgatccaaatatggaagaattagaaggaacttggtcgtcaaaatcaaatacagtatttactggaccaggattttatgatcctgtagaagaattattaattgaaccggatttaccagggatttgttattcatttactaaagatggtcattatgaagaagcattatatcgagttaaaccaaatcctaaaaatcattcatgtgctgtagcatcagttacttatcaacatggtaaatatgaattattatctaatggatcattagtgttaactccaattgctgttgatggtagacaattattaagtgatccttgtaattcagaagatccttctaaatcaacttatacaagatatgttcaatctacttggtttaaaacttaccaagtatatgttgattcttatcatggaagatggacattacaaatttatcaatttgatgggtctaaaatgcaaccattatatttggcttataaaccaccagttatgttaccaacaatagcattaaatccaaccgatgaagcttcagaaactgccctgactttaggtagtgtgtctcataaaattaaaagaagtagaatgagaattaaacgatcattggaaaatcaatatagaacaaatgctaaaagagaaatttatactgaaaaatttgataaaatttggtggtcttcagttttttgtttagctttagcatcatcatatttctttcttaaaagataa

SEQ ID NO: 6260 - DNA, 852 bp, Candida albicans
atgagagggtcgacgtttcacaaggttataagaacctattccacaactcctgcatcgacatcttcaagtatctccctgacattggttttatcaagattgcccattataactcccgacgtaccaaaatttgatcaacaattctacaattatcaaacagaattatggagaagattgatgtggacatttcctaaatggttttattttagacctgggacattatctgaacaaaaattcaaagaacttaatgaaaaccccgtgagttatgaccctaaagtaatttatccaagggggaagccagatttaaaacataatcgagatcgtagattcagacaatatataagattaccaaaaacttataaagaagaaagtgaattggttgaaggagaagaaaatacacaactggatcaagatatcgctagaaaaattgtacccaattcaagaattactgaagctgacaaaaagaatgattcaactagtttggaaagaaaattgagtagaacattatatttagtggttaaacaaagtgaatcagatggtgaatggaaattcccaaatttcaaacaaccagagaacggtgacttggtacctttgcatgaattagctgaaactggattatattctattggtgggaagaaaattaactatttcaatgtttctcgtgtgccatgccatgtaattcaagattccaaagattcctccaaacaatactttataaaatctcacatattatctggggcatttgaagctcaagaaaaagatgttgaatttaaatggttaacaaaagaagaattgggagaatgtttatcagcagagtattataaagacatagagcatttgctaaatgatgtttaa

SEQ ID NO: 6261 - DNA, 1890 bp, Candida albicans
atgtttagtaggctgatactactacgatcagtaagaaaatcacttggtagatactattcttcacaagcacatccacaaacatatatttacaacttgttgagtgatacgaaatgtcgatcgtgtgggattcaattgcaggataaatttcctgacaaaccaggttattatcgtttacctggtcaaaacgacagcaataccgacaaaaaagctaaaacttcagaattgaataagaaatatgaaaaaatactacaaaatttagacatctctgatagaaatttgttaatcaacaatttcagtgctccaaaacaagatgatgagaaagttgcatcagtaccaagtttacaacaaataacaccagttgaagcagatactcgtgacacaaccaaagatcaacaaacccatctggggcatagtttaagctgcaaacgttgcaatgatgtaatttataattccaaaactagaagtatttatgacccaaacagggataatttaaacaaatcagaattccccattcctaaattacaacaagtgttgtctactatcccagtagatgctccgttagtttatgttttcagtgcaaatgatttccccatggggataaataaggatattttccaatatcgcccaccacaacagatttactttgtcatgaccaagagtgatattttgatcccaaaaacaaatgttgccttttataataattttaagaaatttttacaaaattatatgtttaaaaaatttaatgtaccccgtgaaaatgtttttatcgcttcaggcaaagatcgttggaaaatgactgatttatatcattttatcccaaactattcgtacattattggtgatacaaattgtgggaaatctacgttagtgaaaagtttattgatcaaccatcatgttaaacactggaaatacgaagctcttcaacaaagaccagacgaaaaacaatcttcttctgcttcattgaaaaataaagattttaaaaaattggatagattaatcgattcattcagctccaaaaatggtcccggaacttcgcatatccctggattcactcgtgatgttgttcctgttgatattgatggtataaaagaattatttgatgtaccaggctttaccacaaatgagaatttacaagatatttttgataaattgaatcacaaacaaattgctcggataactaaaggggcaaacacttctaaatatggatcattgaaatcgaaatttgatactgtcaaaaatgggcaagtgttgagtttaaatggggtaggttacttacaatttccgggacaagattcaatgtatcaaatacgaaacgttactaaatttgcattgcataaatttaaaaatcttgaaaaagttgattcaattttacaacgcaacgaaattcctaaatcaatgagtagtcactttattgtcaatcgtcagcagcaacagcaacaacgaaatgaattacgtggttattataagagatacattatcccaccattttatggtacaattgatctagtgattaaagatattggatatattaatattaaaccaacggggaagaaattgactaatgaattaatggtgttatatttacatcctagtttggaggcaatcattcgtcaaccaattttgaattatattgattctccaactccaaagaaatcacctgacgggacgaataggaagaccattaccagtgacattagcaagactccattttatagtcggttgatacctagtactgttcttctggacccatcatcattggtattgctgcccccgtcatctgactataatcaattgaatcaatatttacaaattgatgaatcaagtgagtctgcctacaatgatctccttgaattggatgaaacaaataaatacgattattggattgaatga

SEQ ID NO: 6262 - DNA, 1008 bp, Candida albicans
atgatgatgcacttacaacaaacaccaactaaaagatcaatcttaccaccaatcactccattaactaattccaacaatggttcaaaactaagtttaccacctttatcttctattttaccaactgctccaagtagtcattatagagatcatccattgactactagtaccccatacaaggcaccattgccatcaataaatacttcagctgcttatcaaagtccatcaatgacttatggtagttatattccaactccagaatcagccacttcactggtaactagttccaataagagaagcttttctgtgctcgatgattcatcaataatggatactagtatactagaagaaagaaaattaaaggcatccaccagttcatcagttgcttccacatcttcttcatctccaacactttcttcacctgcctctactcctactgacaacaaggcttatgcatttatttcacattcactagctactttcccactgcaagaaccatcaattgataatgctccattagcaagacgtaaaagaagaagaacttcacctcatgaattaaatatattgaatcaagaatttgctttaggaacaacccctaataaatcaagaagaattcaaattgctaaaaaagtttccatgacggaaaaggctgtacaaatatggtttcaaaataaaagacaatcaataagaaaacaactgaatctggaaaaagaaatcactgtattaccaccaacttcaaattatcccccatttcaacaacaccaaccagaacaaatatcaactttacctccacctccaccagcacaagtgcaacctgtacaacctgtacaatctgtgcaactaccaattcaagctcaatcaacaccattaccaaaacctgctagcatttccccactcccgattacaaattcctatacttctatgaaattcaaatttatgccaagtaagagtaaagtcactcgtaaactacaagaatgtaaagctttaggtgatatcaccaatttacaataa

SEQ ID NO: 6263 - DNA, 813 bp, Candida albicans
atgggggaaccatttttgaaaaaatggcgtcaagctgaggaaaatattcaatttataattgataaatgggttaaaataattatattagtagaaagatatgaaagacgtcaacaacaaattagttttgataatgggaaatttgctgaaatgttaaatggatttagtaaattaaataccaagatttatcctgataatgaagataataacaatagtactagaaatgatgttaatgttaatgttgttgttgttgataataatgaaaattataaacaagattttgattttaattcttcaggtgatattattaatattaatcaatgtttaaattccattggagaatttttcaataaatcatctcaagtattaattgatgaaagttatattattaatactaaaactttagaaaagtttaaaaattatttggattatttgaattcattacaagaattatttgaaagaactaaacaattatcaattaatcaaattgatttattagataaacgtataaaagatcaagaaattaaatttaaaaaaattagtgaagaaaatcctgatatcaaaggtggtgaattaattaaattaagacaatcaattataaatgataaacaagaaatttttcaacaattaaataaagattggttaattaaacaatgttgtttacaagaatttattattttccaagaaactcaatttttaattacggaactttgggttgaatggtgtaaagatcgtttgaaatgtcaagagaaattagttggtttatatgataatttaaatcaagaaattattcatgatatgcctctagagagatga

SEQ ID NO: 6264 - DNA, 1137 bp, Candida albicans
atggttaatttttcttaccaaaaaaacaaaaatcttgaactaaaaatctaccagcaaactaagtatattcttataacaagtataaatacccatccctgttcatatccaaaattaccgactgatttcatgataaggctgtgcttagttagaattgggaatatcccttctgtaactccttcattacattctacacctttctatacaaagaaactattacacccgttacttatacactcgtcattcatacgaaagttttcgtcatgtcgacccgagtttcaggctgtgccgtctttaaataatgacaaacctttaaaaaatacccagtcatcacagaaaaatgggaacaacgaaaaggataccaatagcaaggaagagcaaaaggtggaggacgatgcaacaaacaccgatactttgagttctggaaaagttctaccagaaggtgttagtaaagatgaatttttaacagaaatatttgggaatttggatccttacattgacacttattcaatttacaaacagttgcgtgaagcggaatttactcccgaacaatcagatcaaattatatcattattagttcaccaattaaactccaaattgactaaactatcaaccatatacgctcagaattttgagttagaaaacgaacagtatttatttgaaagtgcccaacaggaaatacgagtagacataaccagatcaagggaccaacacatcaatgaactaattgcattaattaatattttggaaagagactttaatgttattaatgatgaattgaataatgattatttaaaattgaaaaatgattctcaagtggcgataaatgaaggcaaatcagaaaacacattaaattcgaaaaaattgtttcttcgaattcaagaggcaaatcataagatcactacagaattgaattcagatatcaaatcagagatagaaagtttgcgatggtacttatcacgatgggggttgattacactattagtgtctttattcctgggactaatcatattttacaataccaaacgtagaaatgttaccaaggaagctaaaaaggattttgcacctttagtcattcgagaacctagtgaatatgaagatgatgattaccatactgagttagatagaggatctgtttaa

SEQ ID NO: 6265 - DNA, 546 bp, Candida albicans
atgtttgcatttaaaaaatctactacttcaattctcaaaacagtggtcgccccaacatcatctcgttatttatccaccgtcacattaagatcaatcccaagaacattccataatgccactaaagtttcattattcaatggattaagaactacaccaagattttatagtgtattgactgaatctccagaggcaaaagtatataaatatgccgatgttaaggatgtggccgtacaccctgaaaaccaccctgattctgttttagtggatgttagagaaccaactgaatttggagatggtcatataccaggagctttgaatattccatttaaaagtagtcccggcgcattggatttgtcagaagaagatttccaagaacattttggatttcctaaaccaagtactgataaagaattgattttctattgtcttggaggtgttagatctactgcagctgaagaattggccaatacttttggttataagaaaagaggaaattatcttggaagttgggaagattgggtaaaacatgaaaataaaaagaactaa

SEQ ID NO: 6266 - DNA, 1470 bp, Candida albicans
atgtcaaggacaaaatctacaaaggtcctaattattggggccggggtttctggattaaaagctgcagaaacaatattgtcgaaatcatttttaacaggtgacgacgttttagtggttgaagcccaaaatcgaattggtggcagattaaaaacaacagacacttctcaatctaaactaggaataaattatgatttaggggcatcgtggtttcatgattcattgaacaatatagtattgaatcatatgattaacgatggtttgttagatgatgagaaagatgtctattttgatgacaaggatcttaaaactttttctagtactggagaagtacctattgtggacaagaaactaaacagagtattagaagacattgaaaagtatattcaattgtatttcaatcggaatttaggtgttcccgatttatccttgcgagacattgttgcacaatattttgaaaaatataatcggttgattactgaagagcaacgtgaatattgtggaaggatgatgaggtatttggaattttggtttggaattagttgggatagaattagtggcaaatatgctgtaacaactcatcaaggaagaaacttgttaaataaaaaaggatatggctatttagtcgagagtttggccaaaaggataccagaatcttctttgttattagaagaaccggtaaacaaaatcatcaggaataataaagacgctggcaagagggtattggttgaaactataaacggattacaaatattttgtgactatttgatcgtcacagttcctcaatcaattctactgttggaagaaagctcaccctatagcattaaatgggaaccaaaattgccacaaagattagtggagtcaataaattcaatacattttggggctttgggtaaagtaatctttgagtttgacagaatattctgggacaattctaaagatagatttcagattatagctgatcacacagatggtgatttatctcgcgaattgacagagttaccgaaaccatttacatatcccttgtttgctgtaaattttggccgtgttcataacgggaaagcaagtctagtaatacttacccaagcacctttgacaaattatctcgagacccatcctgatcaagcttggcaatattatcaaccaatgttgcagaaactctccattaatgatgagccgattcctgatccaatcaacacaatagtcaccgattggacaacgaacccatatatccgtggctcttattcaacaatgtacaccaacgatgatccaagtgatttaataattagtttatcaggtgactttgaagatttggggatcctggaaccttacattaagtttgctggagagcacacaacttcagaaggtactggatgtgtacatggtgcctatatgagtggtatttatgctgctgattgtattttagaaaacatctttcgtaacgatgttactggttataccattatcggttaa

SEQ ID NO: 6267 - DNA, 1101 bp, Candida albicans
atgtctacatcaattcctactgaatcaccacttactaccaataacaccaccactaccactgctgctgacatcagcaccactagtggtactactgcaactccagctcaagcttcagttccaacttcaacttcatcaattgctgatactcatcattcatcttgttcaaccactgattttttgacttggaagaacccaatcaaaactggtaaagtttttggttcccttgtttttggtttgattgtcttgaaaactgtcaatttattcaatatctttttccatttagcttacattggtttattgatctctgctgctgctgaatattccggtaaattgattactggtaaagggttccttgctaatttcaaaccaactggtaaattgtacgctaaaagattcaatgatgaagtattgccagaattggccaactttaatgtgcatttggaagaaagttttaataaaattgtctattcacatgacattgaaaccactttgaaagctgctggtatttcttatattttatataaattgacttcatggttttcattgtacactttgattttcattttcgttgtgttgattttcaccgttcctgtcatttacaaaacttacaagaaggaaattgatgctgctgttgccgatattaccaagaccattaaaaccaagtctgctgaatttactgaaaaggctcataaagctgctggtccacatattgatactttaatcaagaaaactggtccaattggaagctttattcaatccaaactcccagtcagaactgctggttccactgttggtgactcaaaggcaacatcttatggtactgatgctgacaaaagtatcgctggtactacttctgctactggtacttcttctgctactgctaactcaactactgttcctgtttccgttcctgctgctacttctgcttcttctgctgaaccaatttcaactggtcattccactggtgcttctcaattcccaagtgctccaacttctggtttacatccaagtaccgttgaagatgttatcaaacaagcttccgaagaagccgatgaatttgctgacactactcaagaatcatttaaaccaactttacattaa

SEQ ID NO: 6268 - DNA, 2274 bp, Candida albicans
atgtacagacgtagcctaatactaaggcattcaaatttaccatctcgatgtataaacattattagaaactatagtaattcacaaccatcagataataagtacaaggattatgattttataatagaagaaaatagatcgccacaagatatcgtgaagaattatttatcaccagaacaaattgaagggcacattgaatcagaaggggtattaccaccacaggaaatgtctccttttagaaatcctgatggaacttttatcaaggggaaaaattctgctgaggcaagattagatgatcgtacattagaaggtaaaatagaccattcaatcacagaattaccccatcgtatagccaaaactatacaaaataatataatcaaattatctatcccagcaagattacgtactcgagttgcccacatatatcaaaatttacaaaaaaatcaaattcaacaagctccatcaacacctttggattgtaatgctcatattgccgcgttattcttacaagattatagtcatgcaaagcaagtattatcggaattacaaagacgagttggcaaagataaatttaaaccacaaaggattttagatattggatatggtccagctactggtattgtagctttaaatgaaattatggggaataaatgggtgcctgaagaaaaagaagcatatattgttggtagaaaaaataatgaaatgaagaaaagggcaaaaattattttatcaagacaattgaatgaaaattattcaggtaaggaattaaatcttgatgagaatgttgtacagaaagatcaacgtccagtgcaagaagaggaagactatgttgaagaagaagaagagaatagctcagaagaaaatgattatgtgggtcatattgatgttaaaagacttcatattcgtacaaaattgagagacactttaccagtaactaagaattatgatttgattatcattcattcttcattgttatcaaaagaatttaattttcctaaagatgttgatgacaatattcatatggtgttgccattattggcacctggtggtcatttagtgttgatcgaacgtggtaactctgtaggttttgaaactattgcccgtgctagacagattatgattagaccagaatcttatccacaagagttgggtaaaattcctcgaccatatattaaaggttctaaaggtaaaccacagaaaatgaaaaaagaagatcagtttattactcaagaagatgttgaatttgaaaaagagttattagctaaattagattatcaagaggcattggagaaagctcgtgaattgggtgaagatttcgagaaggaattgaatgaaaaatttggtgctgtatctgaagaagaattgaaatttgaaaacgaagattctgaagagcttgaagtgtttgatgttaatactccacgtgaagatatgtatgataaagtggattatcatttatcagtgattgcaccatgtccacaccatcgtaaatgcccattacaacttggagaccctaaatattacaagattcctgatcatagacatcgattgaatttttgttcattttccaaaattgttgctcgaccaccatatgttatagaattgaaaaaggggaaaaaattagctattcgttgggataaatcagctgaagatggaattggctccatttccagaaacgctgtaaaacgtttagctggaagtggtagacctggggggcgtgatactgaagtggggtcgtattcttatttgattgttgaaagaagtgccaatgatttggaaacgattaaaaaaattgaagatctcagatcatatagtgataatgtaattgatgaaaatgatatcactaattggccacgtataattgccacaccaaacaaattgaaaagaaatgttaaattgactgtttgttcaactgaaggtaacgttgaaacttggcaagtaccaaaatcattggggaaacaaacctatcatgacgctagaaaaagtcaattgggagattcttgggcattaggtaggaaaaccagaactattaaaaatcaaattccagaagctgtgaaagataaattggatgtattatacaaaacttctaaaaagacatttaaaaaggaacaacaaagaaaacgttggaagaaaaaagttggtactagtgttgaagagtttgaagatgggtttttcgctactgaagttatggcatctcaattggaactgtctaagaaatataaacaacaagctagacaagcacaattcgaagaggatccaagtaaatttgatggtaattag

SEQ ID NO: 6269 - DNA, 360 bp, Candida albicans
atgtattacgaattatttgctatagcacgtataacagatccattgaatacggcaaaggaagccaccaaaattgcatctacagtggggaaattgatattgaataatagaggtatcataagggatataaccagtcttggagccaaaccattaccccaaatcatatcaaaagaacaagaaagacattttcaaggatatcattttataattggatttgattcctcaccaaatgtccaaacacaattattaagaactttacgaagagatccaagaattttaagatccagtataatgaaacatgatttgacacataatttgaatccaggtactactattgaacaagcattaagagctactaaatga

SEQ ID NO: 6270 - DNA, 1668 bp, Candida albicans
atgttgagatttcgccaaattagattatctcctatttataaaagtcgattaatcaatttccgtagattcaactcaacaaactcgaaaaagcccaaggcagaagaagaagacaacaacaacaacaacgataaatctttgcaacaacataatgtaccagctaggcaagatgataaaactgatgttggatcatttaagataaaaccagcaacatcaagatcagcacctgctcccatggaaaatactggtattgaacaattaatgcataaagacaataaaccatatattcccaaattgcaacataaaagagtatcatttgagtatcccaatttaccaaatcaagatgaatataccaatttagttgaaaaaccaaaatcaataactcgatggacaagatatatacccaaaatattgacagtgattgtattagtatggtcaggttatacatatcatgtatggatgacagatactgaagaaggtgaagatagttctgatttattaaatcctaatgaattccataaatttattgttactcataaagaaaagattgatgatgatcattatataattgaattgactcccaagttttcttattgggaatatagtcatggaactgatccagaagggaaaagtttatggaatggggataaattttggtcagtagaaattaaacaacccgatattaatgtcgttagatcttatactccattaccgctatattatttgaaatcggaatatactcgatcgggtgaacgagaaccattattgaaagtcattaatcctgaaatagatgaatatgataaacatggaacaatgtgtctttatatcaagagatataatgatggtgaagtttcaagatatattactgatcgtaacattggtgatgaattagaattaagaggtcctaatattgaattcaaatttccttatcatcctttacataaattacataaacgtccaattttcaaagatttaccatcaaaagtcgaagctgataatatgatagaaacagttaaacgagtaaataatttacctgatgttgataatattgtattttatgcagctgggaccggtattgccccaatattacaagtattattttcgaaaaaaccatatttgggccatgttgatattcattattctgctagacatccaggagaattgggtattttacaaagatttttatttttcttggataaattggatcgaatcaatattacttatcattatgatgatgatgatgatgatgatgaaccgaaaaccattttaaatgctaaagatattaatccaccgggtataccaaattatattactcccaaaactttggaagaaaaatctaaatttttaactggagatgaaattgaacaattaagattacaaaaggaacaacaagatcaacaaaatgagaaatctttggttggttctgatatgatgacaaaattggttcaaaaaccagaagatagaggtgaagtttttgaaagtggattacatcaagcaagtaaaactattcaaattcctaaaaaacccgccagtttagctattgtatgtggacccgatggtttcattgattatgtcgctggtgcaaaagatttggttagaaataaacaaggtccagtcaatggattattaggagacaaaaaatgggataactccaatgtatataaactatag

SEQ ID NO: 6271 - DNA, 1086 bp, Candida albicans
atgaaatcatcggagtttatattaggtgaaacagcttataaaaatgctaaaaaatcattacaatccttaataaaacaatataataaccaacctgaaacaattaacacaccaccaccaccagatgatgatgatgatgatgatgaaacttcaactcctattcctaccaataaccaaggtatggcaattcatttagtaattagtattaaaattcctttatcaaggaagaaagattatataccaagaatcatccctattagttataaattagatgacgtaaccaataaatcaatattattaattactaaagatccatcgactccttatcgatcgaaattaatgattaaagattcacctacagaagatttatttctggatattattagttttaaaaaattgaaatccatgattaataagacaagtactagtagtactaataataaggggaagaaacaaaatttaattaaaattttcaaaaattatgatataattgtttgtgatcatcgaatcatgaaattcttaccaaatgtattaggtgaattattttatcataagaataaaaaattaccatttttaattcaaatggcaaagccaatacttctcgaaacttcaaaactaaaagctcaattgaaggctaaaagcaacaacaacaacaacaacaaccaacaaggaccttccattcttgatggattgacaatttctaaagaaaataagattaaagatgaacgatgtgatccaaaatatataaatttacaaatcaaatcgattgttaaaaacacaaattatttacctagtaatgttattaataaaggtgattgtatatcattaaaaattggttatataaattggtcaattgatgaattattaattaatattaatgatattattgattatttaattaataaagaatatttttctacaattggtggtggtggtggtggtgaaggaattataaaagatttaaataatttaggtaatattcatgttaaaactaatcaaagtattagtttaccaattattgataataatgggatgcccaaggggaataatgatggtgaagaagaagaagatagtgattttgatttttaa

SEQ ID NO: 6272 - DNA, 1398 bp, Candida albicans
atgtcaaagttagaacagcaaacaccatcatataagaatatattaccaaacacatatgtgccgtaccttggacataaagttttatataatattttggataggctatccaaaaactctatacttcaatttatcatcttatggaccaagctcaagaacacacaaccaaaaccaccttcaaagtacactcagcatggtttcaacaaaaaaattaccaaggaagtgagtgagtttagaaaattaattaatcgtactccgaaacgtaaactcatcgacaagataatctttgaatactggacccaaggattgaatctactacaaatatctcaaatcgactgccaacttattgtggacaaatcaaatagtgctcaatcatggatttattcaactgtaaaggatatgcatgacaagatagtgccgatctcaatcaacccaagagagtttttaaataatttggtgaaaaatttgtcatcattgtacttgtcatacatttatatatgcaaacatccaaaactaccgataatcttgattaggatccaagtgtttgatttaaatggaatggatattaccgaaaaaccacatattatatctcacaaggcatatttttttgggatttttgtcaattcgcctcatgttgtgcattcaattaacaatgatgctatggtacacgggatagttatggaagcatttgaacggagtttaccacagagtaaaaataacttgcttaaattaataactccagaggaccaatttcctgtgaaatccattcaatcaatgcatattttgaaaggatgcaatcgatctggaaatagtttaggtatttggactccctatgctgatggtactgtggacatgttaccacttggagcaattgaggatcatcaagtatttaaaagcgaagcagagattgacgaggagactaatgaaacagaagatgtggataatctaaagcttcaacgattgaagaaaattgcaaatctacgctttaaagggtcacttacaggtaataaacaatccagcaatgaggaaccaaatcaccaccagcaacaacaacaaccagaacaggactctaaccttgaccaaactgaaagagaaggacaaaccaacgatacagagtttgattctattgctccaattcaatacgccgaatttattcttaaagaaaaaactacagctactagaactgaaaaaagtatcggtgatgatggaagaactaacattaagtttaaaataacagggtcagatgtgtttggaggtttgcatgaactctctgtgaaatcaacagaaccagaagaaataatattaaatccagaagaagtccccaattggctaacaggtgaagaaggtgcttcaattggggaaatcagaaatgggaatttttataacaaaatcaatggatga

SEQ ID NO: 6273 - DNA, 2931 bp, Candida albicans
atgaaaccattttggatatatatttttctatttatactaagtagtgttggtgccaatgaatctactacatccacatcatcatcggtggaacctgcaccaacaccttcgactttagttgacatactatcagaacgtccacagttttcgtattttcttcgacttctacagcgacaaggaatgataccgacactaaaccaaatggaaaatgttactttattagccccaataaatctggcatttgttggaaaaaaaagtatcgattgggataacaatagtttaaataggtatattgtcaatcaaaaacttcgtgttggattattgggcaagtcagaatcagtttatcaaacattatatagggtgggcaataccaactatctgatagcagtaagtccagattttgagagtttggagtatgtgattgatgaggtgtcttatattgtggaagaagatatctatgcaaaacaccagcattcttatattcaaggcatcgaccaattgttaccagaaaaaccaactatttgtgatgttctaatgaataacaccaaccctgaaatatcgttattcagtaagatttttcaactgctatttatagatactgacgagcaacaagtacagagtaaaaagaagaagaagaagaagaaacacaagaaacctaaaaagaccaaattaccacctttacccaactcatgcaaagagtttcttaatggaacaggaaccatattggtgccatccaacaaggttttgaaaaattcgttgacagatatacaattacagtattatttagcaaatagtgattttgcaaggtatgcaactaccacagacgcggtatttgaaattaaacacgatgttatgagtttacttcaaagtcttatgtttcctgcattgattgtaggttccaataacaccaattctaaaataaaatcaaatttggggagtagccataaattcaagctcaaagacggtcatgtggaagttgataaagtggcagtaactgaaagtcatgtctctgctgatggtgtcattcatattttcaaggagacagatctgctttttgaacagctcaacatcgcaacagcggagatgattgcaaggaaatctttgtatgctttgcattactcaaattttgttgatgagctttatttccgatctcttggccaccttgtcgatgggtcgagccaaaaccaatccattttccttgatgtaaatcagagggatgacgttgaagacgatgacgtggaagcgtcagtggcttcctttagctccaaacaaaacatattgtaccaatttgttgacggtaaagtagcgattcatgatactatgcattccttgcttgataccaaactttgttcaaagaagaaaataggtgggtgcttcaagttaaagttctcaatttcaaacgggaagaacaatataacagttaatgatgaggtacacattcaagcgtataccccgattgcaaatgagagtgttgtatttgtggccaatggagaaatcaccccaccagttaatcttaaacattctttgggtgacttgatttcaagtggagctgtacatagacatttggagaatattgaaattgaccaaggcagttgtttgaaaactttggagtacatcaaccgttttggattgtcttctttgcgtgataatgatgaagggtattctatatttttgccatgcggcaccactgacacaaagggtacatggaaagatttggggttgatcttaacatatttagagagaaatcctcatatgctcgaaatggtagtcaaaagcatgtttatggaaggagtggtgtattcagattttacttcacataaaacactaaaagacttgaacggaaaccaggttaaattcaaaagtcgcaatatcacaaatgatgcaaacgaggctacgttgaacaacactcaactttctttcccgttgaactcggacttgctcttccaacaaggtgtgatccatgtgacaaacaaagtttttttccctgatgattttgaggtcccaattgaagaattgatcaagaccacatatgattcaaatttccctagcttttttatgtgggatattttaaaaatgtatcccaatataaataaggtgattaccgggaagcagccttattctttattgattccaacagcagagtctttgaaagactttaatatcaccacctcaatgaaggatctattgcgattcattgactttcatttgataccaaacagtgaagtcacaaaaattctcgattgcatatcaggagagggatataataattctgttatcaaaacgaacttatcagaaggtggcttaacatgtaaacacaaacctcaaacaaacaaggtaatgttacagttgcacaaactaaacacaatatcaactgtttcttacaacaaggatcaagaggtgagattacttagtcatgggtgcaccaagaaatatcaaagtggaacagaccaattatcgtgtgtattcttgattcaaaagccattgaaccttgactggtttgagaaccccaaaaacggagacaactttttacatgtgcacttgggattggtcagtgttggtgtgggtgtcattttaggattaataatatttggtggtgtcatggttggtttgatgttttgtattggaaaaagagaaaagaataacaataaagacgatttcgagtttcctagaccagactccgggttcatgagtgttttgacagatgatgacgagtacgttccttacgatagaggctatgagacagacgttgacgttttgcgaacagaaactgatgcattgcttcccagtcacatgaaaagaaaaaagcgtgttaaaaagccagattatgggtctacaaaacagggaagtaatggtgttacgttaccgagagacataggcgatatcagaagcacattgaaccgtgaaagaaatctcccaggttattcacagtattga

SEQ ID NO: 6274 - DNA, 2229 bp, Candida albicans
atgacagatccattaacattcttggatgagtttaatgaattcttttatttcccagaagataatgatacttttgcaccaaatgaaattgggaaattgaaatttggatcaaagataaatgcaacaccaaaatctattgaagtgcctagttcttatttggatttttcacctgaaacaatgaataatttaccatatagattgagtatatctggtttaccatctttttctagagtagaaactcaaattaaaatgaatttaacaataaatgctcctttcactaatcattatgttcatataacccctgatcttatatcaaaaaagaaattatgtttagaagaaccatattcaaatcttgatgataatattaaaaaacatattttggaatttgacgcttatattcttactcaaagtaataagtcttgtgctgtttgtccaagatgtattaaacgagaacagaaaagagcatcacgtagtaaagctggtgaagagaaatctgccgtttgggattgtgatgttgaaaggaaagcaatcattataaataataaagaaatcattgctttccaatcgggtgttttggaattatctgcaagaatcatatgttattgccgacaccataaagaactggaaggattcaaacttttaatagtacttaaaaaccatttagggcaagttgttgctaaacaaatatcttcccctattatgattatggacagaaagaaaaatttgaaggattcggcacctagttcatcggcaaatttggttgaattggataagaagaaattgtctatttctgattctgataatgaaaaattaatgaccaaccagtttgttcaactatcaccaaattcattggatgaatcggcatctgaagctttagccactactgattatgaaactagaggagtgaaacgtaagaagttgtctgttgatgattctttcaacaccacatctaacccaatgtacaatgggtttagtggttattctccaatgagtaatagtgatacaaatacatcggctataagtcaaagtttctcgggtccaacaatatcaaagccatctctggctcaattttctattggattttcaccgattagtcaaccacaatttccatcacaattccaatcacaaacacaattgctacaacaacaacaacaacaacaacaacaacaacaacaacagcagcagcaacagcaacaacagcaaactgtaccatcaattcaaaaaattataccagctcaaggtctgattcgaggtggcattgaagtcacaattttgggtttcaattttcgtcctggtttgctgatcaagtttggtgcaaatcaagcattggctactcattgttggtcagaaactactattgttacgtatttaccacctgcagcacaaccaggtcaagtcttggtcacgtttgaaaatcaagataatgataatgtaggaggaccacaacaacaacaagtgtttacttatactgatgatactgatcgacaattgattgaattggctttacagattgttggattgaaaatgaatgggaaattagaggatgctaagaatattgctaaaagaattgttggcactgataataataataataataataataataataatagcagtaatactaatactaataccagtactaacagtaatagtccagcagataatgagaatgacaataataataccaataataatactactgctggtgctgctgctcctggtgctgctcctggtaatactgttacctcaacaaattcaaatacatcttctagttttgaaaatgatgaaaaatcaatggctaaattgaataaattagttgaatttttcgaatcgagaactaataatcaagatgatttggaaaaatggtcaagtatgaaaacatcggaaatatttggtgatcaagaagaagaatattttgctgatagtgaagttgtaccatcatataaatcaatattccctaatggtggtaatgctaataataccaaactaatagctgaacctacacctgaagctgatgctggtgccacatcagattcttctgaagatatggttgtcacatatattaatcatcctcgtaaatcaatgaagaatgataaaatgttgttattcttttggataccggcattagtaatcatgttgtttaccttctttatggtatatgtggtgggatatcaattgaatgattattccattgttgaaaaaatgttgaattgtacttctttactaaggtga

SEQ ID NO: 6275 - DNA, 741 bp, Candida albicans
atggcaagacaaaattttgtgggggtcgtcatttcccaaggaaaaatgacaaaaacagtcaaagtccgtgttcaaggaagagtatacgataagcgtgttgacaaagagatccttaccagaaaagattacttggttcatgatgaaggtagcatttgtaaggaaggtgatattgtccgtattgaaagtataccaaagatctcaaaaagaaaagcttttgctattgccgaaattaaagtgaataaaggtcagcaatttgcagcctatgaagaaatggctaaaaaacaagttaaacttgaagaagaaaaagaagcaaagaaattcattgaacatagagagaaatttagcaaaattataactcaattggatgatttgaaaaagatggataagttgactcatgagattaccagcaatatagaggaggaccataccaaactaattgaagagattaatcaaataaaagaaaaatacaacataaaatcatggccaactaccgagtctacagttgatcttggcttgaatgaacctatattttccgacgagaaagaaaagagattatactttatacaatacatcttgaatgagttgatgaacaatgccaagtatgaagaaataagaaagtctattgttgaaagcaagttgaaaaagtcaatggaagaagttagcaaatctatacaaaagaatgttgtcagaagatacttgttagacactagaaatgaatgtccggttccattacctcaataa

SEQ ID NO: 6276 - DNA, 1650 bp, Candida albicans
atgtttgaatcagatttatctttctatctggcccttctaatattatgttgtccaatatcaatagttttcttcaaaaaattccctatcaaaggatatacaggtgcaaataaagtatcattatttttacaatgtttaattgcaatacttaatttgaatattctttacagttttatcaactcacttactatcacgctaggtcatgatggttcctctgctaacacccttacgatagatcccatcactacaacacaacaacagggccacgtggactacacacctataaaagtttccggctacacatttaaaaatcaagttgccaccaagaatttgcaatgtgatagtattgtttacgatcaagatttggaccttcaagtaagtcaagctgttgatttgaacaaaccagaggacttaaaatttttcagagacaaattaaacgaactccgttctttaaataatatttatgatttgttctttcaggataatgaagatgaagttgaagaaagtattttagaaagaaaatggtacaagttttgtgggtctgccgtttggttggacaaatatggcgtttactttatggtcaatagaattgcctattccaaaaaaggtacacggaacaatcctacaatttctgtattagctggtcaagtgtttgataaaaattggattgaattaactggcaaaaaattcccattttctggtcttgaatttcctactattttgcctcattatattgatgaaggtaaagaagcagagaaggtgatattgggtgcagaggatccaagggtaattttacatgaatatactaatgaaaacgggatacgaattcaagaaccattaattgcattcaatgctttaagcacagaagtggattggaaaagggcaatgcatatttatagaccattacatgatccacatcgtattattcgtttgtcaattgaaaactatgctccaagagaaaaggaaaagaattgggcaccatttatagatggtaacaatcttaattttgtgtataatttccccttgagaatactcagatgtaatattaataacggagattgtcaaaaagtgagtggtccagattttaatgacaaatctcatgaaaatgctggtaaattacgtggtggtaccaatttggtagaaattccatcacaatctttgcccaaacatttgaggtctcgcaaatactggtttggtattgcaagatcccatataacggactgtggctgtgttggagagttgtatcgtccacaccttattttgatttctcgtaacaagaaatcagatcagtatgagttaaactatgtatctgatttgatagatttcaatgtcaatcctgaaccatggactcctggtaaaacaacttgcagtgatggtaaactggtgttgattccaaatagtgtggcgtttataaaagatgactacatgagtgtgacattcagtgaagcagataaaactaacaagttgatcaatgcaaaaggttggttaacttatataaccaaaatgttggaatttactcaggaaagattgaaagatgaatccagtgatccagttttggaaagtagattattgagtaaatgctctacgtttttagctcaacaatattgtgcattgtctaaagatactatggggtgggataaattatcaagatga

SEQ ID NO: 6277 - DNA, 1344 bp, Candida albicans
atgacagatctcaccaaacaaccactcaaaggatatgacaatttgtcaacgcctactttattcaacgacaggaatttgcatccaattgcaagatcattcaccacaaatattcttatagttggtggggcttatagtgggttgtctgctttaaggtctctacaactgcatttggccgaacagatacaacgctttaaacaggagcagccatccacaccaataaagaaattgtcactaactatagtagagccaagaaatggacttttgaacatccttggaatcccgaaatcgattgtggattctgcatttgcaaggacacaatttattccgtttaaagacttaaacaattgcaagtttgcaaacatattttccgacaccccaggcgaatacgacatatcgtggtttggtgacgacaacgaatggcttgacatcaactatgtgcatgggagagtgacatatttggaccagcacaaggcacaatatactcttgggtcacccgtatccgagaaagcaattattgagtttgactatgtgattttggccacgggtcgagatagaaactggcccaccacccctttggcaacaacatacgggcaatacatgcttgaaatggacaatgcacgacaggaaattgccaatgccgacaccataagtgttataggtgctggcgctgtgggtattgagtttgctggagatatcaagactaagttcccacacaaaactgtcaatctaatccacccacacgagtgtttcccacaagagccgttgtctaacgagtttaaacggctcacacaggactcactcgaacgagcgggtgtcaatgtgtatcttaacacgagaatcagagccgaatcaatagagacacgccatggtgatctcacaacaacaaacaataagacgattcattcaaacctaaatatatggagctgttccaaacacaacaacattgggtttctctcacagcatatctacgagaattacgtgacaagcaacaaaaatatatccatcaaccagtacttgcagctttacaatgcagaaacaaacacaacaatagagaattttttcgtgttgggtgatttggtggagttacccattatcaagtctgcgggctgggccatgtacatgggccgacaagttgccaacaatttgagcaacttgatattcaatgggatatttgttgaactgttcccggacttgaatgccattccgtacgggatggtgattgttggtggtaacaacgagattatcagtgagctagctggtgaggttgaagtggataatgagcattataaacaagagtatgaggattattgtataggtaaaattagagcaactatagatatgtaa

SEQ ID NO: 6278 - DNA, 2385 bp, Candida albicans
atgccacaagataatccagaatcaaccaatctcactggtgatattggtaataataataataataataacaaaggagaacaacaactgccattatcggggcaagacattgcaaaaaacaaccaagaccacgataatattcaagaaatactacagtctgactcgattttcaaaactcctgaacaagtagaaactcatgatattctttccacattaacttcaaattgttataatgaacaaggtcaagaacttaatcttcaaggacatcaacaaattaatattcatccagatttctattacaataaacataatgaatctatatttgacgatgaaagaatattcccctgtttaccgaccaccaatgataatgaagatttagttaaatacgatgaattcaaccctgaattaataaatcatgccaccataaaggctcttataattcaaatgacttcaccagaaattattgattatagtttaatttgtgattttttccttacttatcgaatgtttagtaatagtaatgaaattatgaatttattacttacaaggttaatttgggcattacaatatcttaattcagtgagtgaagataatattaaaattgggaaattagtcttggtaagaacatttgttgttttaagacattggattattaattattttgttgatgatttcaataataataatgaattatgtgattatttcactaataccataaataaaatcaccttggaatcaaatttaattcctcaacaacaagaaccaacaaacaaggttgatagtaatcacagtttattcactaggaaaattcttggagatttgaaaattcattggcttaaaattattaatgaattttggcttttagatcttgatatacattccatgttgactaataacagcgcgtatgattacattttacctttaacatcaacattaaataatattaaaaaattatctaaatcaaatactgaagcttcaattcgttcaaatccatcatatcgtcgttcagctatgctttcattatatgatcaaagaattcaacataaaatgttgatatttgatgatactagtagtaataatcaacaagaaaaccctcaattttcaattaataatttacttttacatcatcattcatcaagagtctctatcaataacaaaatcaaaaccattcaacaacaaaagaaattactcaaatcaccaacattttcaagttcatttaatataccaaaatctccattgatatcaaatagtaatcttgccaatatacctagtccaacacctgcacctacacatacacttacaacaccaacaagattacatctgagatccaacaataaacgagcattaatgcaatctaacagacataatcatatgaatattaaagattcgtcacttgatttgaaaaaaacaacaacaactattctgaggaattttgatagaacagatattgtggaacaagaaggggatacagattttgatgaagaaaaagaaaatgaagaaactgaagaagtcgattttgatcaagtacatgacattgataatgacaaatccccagaatcacagttttcagaatcagaatcaaaaagatatagtcaagttggattttctactaatgggaatattaaattaccaacatctaaagtcacagtaattgttccacctactccagttaaaaaaatggaaaaacctccattaatcgaggatgatattcaaccatcatccatgacaccaccaaaattatatcatcctcaatttcaaccaccaccatcatcgagtaattccattagaactgaaaatgaagatttaaatcgaagagggtcaataaggaaattaatggataattggaaaaaatcattaattgttcataaggtttcgtcatcggcaactgatatgccaattaatagaaccatgtcgacaaaaccatcaactgaagatcttgatagactaataaacaatgctatgagtgttatgaatgaaaaaactgtgattggtaaaagagtagatgttttaagtgcaagaataatcgatgaattggaatatttgattagatattatattagtagtgaatcaagtagtgttattcatgaaatgaattatcatgatgacactggtgatgacatggaaatggaagttattaatgacaatgataatgatcttgaagaagaagatgatgatgacagaccacatcgaaggacaagacaggataaaggtgatgttgatttacacccaatagaagtatctcctacaagagccgatgaaatagaaatggatattaatgatttatcagatttaaatattgttaaaattgataatcttattaatgatactactgctgataatagtcattcagtgaaagttccaagaaatatatctacaagtatttcttag

SEQ ID NO: 6279 - DNA, 702 bp, Candida albicans
atgactgaaaatacaacaccttattacaagaaacaggcatcataccaagataaacggtataccataaacaagtccaatttaatcgaaccgattattcgacatcgaatacaagactccttattttacaaacaacatttatatttgagtaatgaggcaacaatactaccgattattatcgaacatgtacattacattggaggtacagattcttcaaaccgaccaagcacttttatatcgtgtttattcagattgttagaacttgaaccaagtaaagagataatcaaaacatatttgacccagcttgattttaatgagttcaagtacctcacggcattgacattgatttacatccgcttaacatatccaagtcaggaagtatattccatatttgatcaatactttcaagatttccggaagttacgaataaaattgaaaacgccagtgtttgactcacagaaattgcccattcattataaaatcacatttattgacgaatgggtggatacattattggtgaatgaacgagtaattgatttgatgttaccacgactaataccaagaacaacgcttgttgagcgtggtcaacttgctccaagacaatattacattgacgtcagtgacgaagaagagaaagatgctggcgaagaagagaaagatgctggcgaagaagaagataatgattatgaaagtgatagtgattag

SEQ ID NO: 6280 - DNA, 3324 bp, Candida albicans
atgccacctgaagaattacatgacagcgatttactgtcagttgcatcctcaactacaccctcaacggttcaacaatctttagagaatgaaaatattcctgttcagttagatgagctgaaaattgtcggagataatactgaaaactatattgtgaatgcatacttccctgaaggtgacgagcgtaatctcgcctatacaattgtgaaagaagaacctgaaataaaacctagcttgtggaacaagtttgtggattttgtttggcctgattacattctcaaacatttagattatccttccttcaaaattacatttcgtagctggtgccaattgtgggtatgcacagtgttaacaattatcccagcaacaagtcattggatgggcggtgctgcatacttgataattgttttagggtttatcaccgtttctggggggacctctatcgccatgaatacactttccagtattgcggggtttattggtgttattattgcattccttcatcatgtgattacaacaaaaattataaaccacatccatcatggtatcacacctgaaacacttaccaaaaacttgatagatgaaggtctttgtcactttgattccggtttagaacaatgtatccaagatcaaattttcactggtagatacatcaccactactggttcagctgtcaccattctttcaataatcacatgcacattcattgtcggtaacatgagagaacatatgcatccattgtgggcattggtctatgtctctggtcagattgcaatttgtatatttgcctgttacggccattttctgccgttgtttgatcctttggaaattggttatgtcgttatcaaaccttttgcattagggttcattgcaaagatagtttcagccttgcttgtgtatccaaccacatcaaactggtctttcttcaatggttacactaaaatcttgaaaggattgaaatcgtctctggaaaagaatgccaaattctttaaaaccatgaaaccttcagcatccaattttggaaactataaaatgtttaaaaaagagatactcaagcttcgtgggtctatggcacccttggaaatagttgcatcgacaatctggttagaatactcgtatgggagatttgatgttggtgatgtgggagagtttagatcccttttaaagaatttatttacctcatcatcaacttatacttatttttatcaattgttggaagaacgaactcattttgttagaaacgaatttgctcttgtaagaaagaggtctaatgcttcttctcaatttgcccgaaaaccagcatttgataaaaccgacctttcctacacagatgtggcagaatacgagttgagacagagactgaaaatcatgaaaagtagaataatacttcaaggggaagaagacagtagacttacaactatagtgattgatgagatggcgaccagaatctctcagtattttgcaggattattggataatgctgataccggcattgaagttatagctgagtggttggaagccgccaatgatttcagaatattctcctgggttcctggtcaatggagcaaacatgtgtcgttgcaagaacaattgaattcaaaagtcaaggtagtgaagctggaattggaaattgaactagccaagtttgataatgtggaaacccttaaaaagattatgattgatacttcaaaacccgagaaagaagttttatttttgattagtcagggtgtttttttcttgcagattgtcaaacatcaatgtgagaacattctcaaagtattagactattgtcttgaacttgacgaaagaaggccaacacctaaatttatcacctatttctcaaagccaaagtactcggaaccaaagcatttgtctaataagattgatgtgacaaatcctggactggaaaatattgtacggaaaagaaatgccgatactttgcctccgatcaacttgttccagtatattgggtacctattcactaaattgtacaagtaccttatcagcaacgaattctggttttggataaaagtgggtggaatcatcactatcggggcaataccttattttgtaaggccacttgcaaacttgtactacagaaacaggatgatttggttggttattgtgattgcggtatccattagtgaaaatactggatcatcagtttatgttgtcttcgcaagattgtgctactctttctttggtgctgtggtgggtatggttgcttggtacatttcatgtggcaatggacaaggtaattattatgggtacggggcagttacggcggttcttttcatgtatttcatatattttcgccacttttccgttcaccaaacgctattacctcaaatattgtactcggtcactgcagttttggtcttgggcacttcctgggttgacgcaaaatacaacaagttagctaatgttgatgttggttataaaccagcgtatttgagattcataggtgttgccattgggttatgtcttggtatgttggccgtgttgcttccgaaacctatttcatcaaaagcaattgttcgtaatgttttggcaaagaccatatctgagactggtaacatacattgtgacgtagcaaattttgctttggctcgtcttgaaacccctgactacaatataaagggcaggcaagatgccgttttaagcaactatagttctttgttaatgagaatggcagggttgtcaaagctcatgtcattgaagcttgaagttccgatagcaggatactggccggaaagcaaatacaaacgattgctgggtttggtaactgacgttattcagctctaccttatgttgtcgagtgctcttcaagggttggatggccctgagaaatggttgccggtggttataaagagagttggattctgttttccagacttgcaagcagaagtatttgctactattcatatggcatccgatgctttaagaacaaagcaagctttacctaaaatcacagaggccaatatctcacttaagcatatggaattgttaagacaacaatgggggttgagaaggatttctttaagtgagagattctactgtgatagtgccatcaataataacaacgagaacactctgaaagaattagatcactacaaacttttcagtaacgatggtcagttgaatattatgtccttgctagtagctcacatgatttacaatcgtttggatgagatcatgattttagtcaaaggattagttggagaaatctatgacttgaatgaaaggatattggttgacgaagatgactactttgaattcaaacaagatttggaattctctgatgataaagaaaatagtgcattctaa

SEQ ID NO: 6281 - DNA, 417 bp, Candida albicans
atggatgacgcagaattaaatgctattagacaagcaagattagcagaattacaaagaaatgctgccggaggtggcagtagtaccaatccatcttcttcttcttcgggtggcgcacaagacctggcacaagagaatatgaccataaccatattaaatcgagtcttaactaatgaagctagagaaagattaagtcgtgtaaagattgttagacccgatagagctcaagcagtagaaaattatattattaaattatattcaatgggtcaaatacatcaaaaacttggtgaaaaagatattgtgcaaatattagatggattaagtagagatagtcaacaaaagcaacaaacaaaaataactttcaataggaaaaatatagctgctgatgatgatgaagatgacgatgatttctttgattaa

SEQ ID NO: 6282 - DNA, 960 bp, Candida albicans
atgtcaacgaaatcagcaaattcaactgctgtcaattcatttaatgcaaaccactccaactatgacgtttttagaccttcattcaccccagttttggtcaatacattcttagtacatcttggattagctacgaaaaacccagatgacactttcacttttgacatatccaaacatattcttgaaattgctgctggtactggtaaattcacccgaaacttggttgataatggttggacagataatttagctgtgttagaacctagtaaaggaatgttagaaacatttaataagaatttccctcaaattaaaaatcaaattcttggatcatcatacaaaatccctcttgaagataattccattgatgcggtgataattgctcaaggtttccattggtttgctgatttggatagtttgaaagaaatctatcgtgttttaaaaccacaagggaaattaggattgatttggaatttcgattatgccagtccaagtcaagattcaagtgttgccgactcggaatacttcaatgcaggtactcaatattataacactttgaattttaatcttgatactaatgaaaaagtgtttgaacaatattttgacaatcaacaatggaacaaagctgcaacaaaatttatatatggtttcgatgttaatgtgcctcagtatcgacacgggaaatggagacaagttttaaaagataatccatatttcagttctgaagaaacaaatttgtttgcattatacgacctaattgttgccaaggatgatgcttggaagtattgggagacaagatcttacattactgagaagtcagacgatgaaaaacaaagaataaaacaaaactttaatgaattggtagagaagaacctcgatgattcaagctattctgataaagataaacaattaataattaaacctatggcaactcatgctgttgtatcacaaaaaaaatcgtcttga

SEQ ID NO: 6283 - DNA, 1167 bp, Candida albicans
atgagggagactacaccattgaagaagagctataaaaagtataagagcactaccagggaagatgatagtgaggtactgggatattacgatcacgaacaacaatacgaagaatacgaggattcattctcgatgagtaagactaccaaatatactttatttacaataattggattgataactttattggccttatatttctttacggttttcctaccggattatttcattcctgaagcagttgctttaaaacctattgaaaatatatccgatatacccgttacattagtcccatcatctaacaaggaaaacagcgaggctaatgataagaaaatggtggatagaataatcttgattggtgatattcatggtcattatattgaatttagaaaattattgacgaaaataaattataataaacataaagatcatttaattgttttaggtgattttataagtaaaggtcccgattcatttaaaacattagattatttgattaataataatattgattgtgtattgggtaaccatgaatattatattttacaaaattatgccacattccatggattagaccaaccaaatttctcatcatctgagagtcagccaatagccgttaaagattcatttaatgatgacccggaattcttattggctaaaaaactcgaaccccatcatgttaaatatatcaataattgctcgataattaaaaaattgggatatgtgccaaatcctaaaggaaagaaaaagaataaagttggtgatggcgccgattatagtcaaggaattgccgttcatgctggtattagaccagatttaccattagatcaacaagatccaattgataatcttgagatgagatcattaattgggccattttataatgaaacgacagcagatccaactatacctaatagtaaaagttggtcgaaaatttataattcgaaaaatggtgaatacccggctgattatattgtatactatggtcatgatgctggtagaggattgaaaattaaaaaattcaccaaaggcttagattctcgttgtgatagaaatgggaaattatcagctatggttatatctaaaaagcaagtgaccgtggatgtgaatgattacgacaagaagaaatcatttgaattgattgaagaagttgttcaagtcaattgttag

SEQ ID NO: 6284 - DNA, 624 bp, Candida albicans
atgctccgcaagtactccacatcatgtcttctggaatcgttccgactagccatgggaagagtctcgtcccaggcgatgatcttgacttcagcaacatccaaccttaacgaattgcacggtatgaccttgggttcggtgtgttcattgtcggtgttcccatctccgcttatacagtttaatttgcatttaccttcatacacttcgagcgagttgcataaacataaataccttgcattgcacgtattgccgccaacgaaaaactcggtccatctaagtcgaatatttgccaaaggcgtcaagctcaacaagggggcaaagctagcaccaacaaaggaagagaaaatcgacggccaggtattccacgaaatgacaaaaccattcacacgtctccaaaagggagttgactacctgttctacaacatatctgatgtgcaaataccaatattgtccaacgtcgaaacaacattgatatgtcaaacacgaaacaccttccctgtcgacaaccacgaaatatgggtcgcagacgtcgtcgatataatacacaacaagacccaaaaatctggcggcatactatactttgatagagggttccacaagatcggcaaatcgttgtcagaagattag

SEQ ID NO: 6285 - DNA, 1344 bp, Candida albicans
atgacagatctcgccaaacaaccactcaaaggatatgacaatttgtcaacgcctactttattcaacgacaggaatttgcatccaattgcaagatcattcactacaaatattcttatagttggtggggcttatagtgggttgtctgctttaaggtctctacaactacatttggcggagcagatacaacgctttaaacaagagcagccatccacaccaataaagaaattgtcactaactatagtagagccaagaaatggacttttaaacatccttggaatcccgaaatcgattgtggattctgcatttgcaaaaacacaattcattccgtttaaagacttaaacaattgcaagtttgcaaacatattttccgacacgccagacgaatacgacatatcgtggtttggtgacgacaacgaatggctcgacatcaactatgtgcatgggagagtgacatatttggaccagcacaaggcacaatatacttttgggtcacctgtatccgagaaagcaattattgagtttgactatgtgattttggccacgggtcgagatagaaactggcccaccacccctttggcaacaacatacggacaatacatgcttgaaatggacaatgcacgacaggaaattgccaatgccaacaccataagtgttataggtgctggcgctgtgggtattgagtttgctggagatatcaagaccgagttcccacacaaaactgtcaatctaatccacccacacgagtgtttcccacaagagccgttgtccaatgagtttaaacggctcacacaggactcgctcgaacgagcaggtgtcaatgtgtatctcaacacgagaatcagagccgaatcaatagagaaacgtcatggtgatctcacaacaacaaacaataagacgattcattcaaacctaaatatatggagctgttccaaacacaacaacattgggtttctctcacagcatatctacgagaattacgtgacaagcaacaaaaacatatctatcaaccagtacttgcagctttacaatgcagaagcaaacacaacaatagagaattttttcgtgttgggtgatttggtggagttacccattattaaatctgcaggctgggccatgtacatgggacgacaagttgccaacaatttgagcaacttgatattcaatgggatatttgttgaaccgttcccggacttgaatgccattccgtacgggatggtgattgttggtggtaacaacgagattatcagtgagctagctggtgaggttgaagtggataatgagcattataagcaagagtatgaggattattgtataggtaaaattagagcgactatagatatgtaa

SEQ ID NO: 6286 - DNA, 1224 bp, Candida albicans
atgatttccttaagagcattatttgatcttgttacgttgccaattaaattattgttggcgttgttaaagtatcctatttttggtggtgtcaacaaaagatacaagaatgatttggcgaattctttgaaagttattctttgtcgttctttgattaatttccctgttaaagataccccaatttttgcaactacacccacaggcgacatgattaacaaaggaattggtaagacctatcccaatatgactaaattgccacattttggtgagaagtttgataagcaaagttattggcttgttgaaagtaagaacagaaaaccaaatgacccggttttgatttacttgcacggtggtggctatttccttgatgttgcaccacaacagattgaaactttattgagtatttatcatttgttagagccagcaaagaaactgagattctcgattcttgtgttgaattataatttgacatccaaaggttttcctgttccgcaccaattagctcagttagttgatacttacacttctttggttagaggaggatctgaaaatctcttattaatgggtgattctgcaggtggtaatttggctataacttttacccaatacttgagattgaacaagccaaacttgccttatcctagaagtgttattttggtcagtccttgggtcaaattaatcccagaagtgtatcaaaatactccaggccattcatactataattactctgctaacgatgtgatccaatatgatcgtttttccagtgctgaagtttatcaaggtactcttggtaacacaaaactcaagtcgttaactgtttctccaggaaattgtccttatgatcctaaagattgggaagagattgatacttacagaaaaccgggatactctgtgtttgttcttgccggagaacacgaatcgttccgtgatgatattttggagtggtctaaatacgcgttggattatcctattcctccaaacttgggaaactcggatggtgtctacaaccctaagattcacaaatacattagaaacaacaaagattctgctcatgttgatgtaaatattgaacctttgggtgttcatgatgtctgcttttttgaaaatttgttgctttcaaaattagaaaatgatgctaatttgactattgatggtgttgatgcaaaacagttctttgccatcgttaatatcgtcaaatttcttgatactgttttgccaggaaagtag

SEQ ID NO: 6287 - DNA, 1245 bp, Candida albicans
atgctttcatttaaaggttggaaggttcttctcagtatccctattaagttattggccgtcttacttaaatatccatttgctggaggcgtaaataaaaaattcaaatatgatttactcaattcactcaagttgattctttatcgaacggctttacatatgcctgttagagaaagtgcgttgttgtcaattatgtcaaaccattttatcattaataaattaatcaaaaatttgtatcctacattgacaaaattaccaagctatggtaaaaaatacgataagcaaagctactggcttgtgaagaacagagacagaaaaccaaatgatccaatattgattttcttgcatggtggggggtatttttttgaaacaatgccctgtcagattgaatccctattgagtatctatcatgtgttagatgcaccaaaaagaagcagtttgtcaatattagttttggattacaagctagcaagtagaggatacaaaatcccgtatcaacttacccagttgattgaaacttatactaatttggtgaaggatggtaacaccaatatgatgctaatgggggattctgctggaggaaatttagctctaacgtttttgcaacacttgagattagaccatgttaatttgccatatccaaccagtaccatattgattagcccttgggtgaaactagcacctgacgaaatacaaaacacacctgggtattcctaccacgataacacgccggtggacatgattcaggttgatttcttcagagatgttgagaagcaaaatgcgattttgggagacatagaacacactgaattgactatatcaccaggaaattgtctttaccgacatgaagactgggaggatattccttcattggtagaacccggtcactcagtatttgttattgtaggtgaacatgaatgctttagagatgatgttttggaatggtgtcattttgctttgaaatctcctttaacttcacaaagagatgattctagaggtgtctttaacccaaagattcatgagtacatcagaaatggtaatgattttgcttatgttgaagtggtggtggagccatggggtgttcacgactcagtattgtattttgaaaacacaataatttccaaggttaagaaaaatccaaaattgaaggtaaacttattaaatagccatgaatactttggattcatcaaacttgtaaacttcttgaataacgtacttccgggaagttcacaaacaaaatttgtataa

SEQ ID NO: 6288 - DNA, 1197 bp, Candida albicans
atggaaaggatacctctttcagtatttgaaaaattcaataatcaagagttgttactggatgttccagaagataggtttatttctaaatctttacagtctccagaaatattttcaactccatgcgaagagtgcacgtactttacgaagtcaaataacaacaacatcctaaagtttgatgatacaactgggttgaatacagttttagtatcatatacacaacaatcaaagaagaggaaacaaaagaaaaccaatgcttcatctaaaggtcgaccaaagataattggctctgaccttacgcaagggttcagtgatttcaaaccagaaagtttaaaagatatatacctgttgaatgatattttcaaatcaatacaatatttgattcaaaacaagaatttcacaccacaagatttcaaaattgttactgctagaagacatttgcagaaactaatgacgatacctattcacaaacaagaggttcaattcaatgtgatatattggaaaggaatgatattttttgcatatgattggaagtctgagagtaccaccaaagtggaagatccgtataataaacttatacaatatactggctttaaatttgaggaagtggtatcagaaggaacaagagatctgaacttttatactgttgttcaacattgtgttgataatattcctgtgatttatacagccgaagttgattgtagtattgataaagaaacaggattagagaattatattgagttgaaaacacatacaaaactagctgatgacaaaataagtacaattaacaaattgaataaaaaattgttatcgacatttatccaaaccaagtttattgattgtcaacattccattataggattcaggtcaaccgatttaaaaatagcgtcaatcaaaaaatacacacaaagagaacttgcaggagagatcaattcattcccagtgatattatctgataaatgctctattaacaccaagctgattttccaatggtataaactaataatgaattggatcatactgaaagaaatcactgaccacaacaccccacaaatatttcgattatctttcaaaagagatcaagagttaatgaattcatatttgaaattggaaaaaatactccaagaagatgataatgatacgatatttaatgatttggttcctgaatggttccagtcgtttattatgaatttattctaa

SEQ ID NO: 6289 - DNA, 2187 bp, Candida albicans
atgcccagtacgtcaaaagttactaccaataaccatgcacaagactctgattcaaatgaattccaacagctcaccacgcaaatagactcaactatatccaatttaaaacaaaagagggattatttacaggatcaactagctcaatttgagtctgttcgtcaaggtttgaagacgtcgggtgattcgacaaccccaatcaagtttcagttagatgatgggacgatgattgaaaaaaccacaacagaagcaattgaatttcttgataaaagggttacagaaattaaagaggcattgacacaatttaacacgaaaataaatgaagcagagtcaacaaaggagaaattgaatcaatttaaccagtttgtacaacaaggtggtaatcatgaagaattaaaacaagagaaattgaatgaagacgggcttccatttgttgatattcaggaagagcttgacgaagacgggaatgtgataaatgtccgattcaaagatgctcaggaagatacaactattgataaaaatgagaaggatagtcgtggcactcctaaagttgaaatattaggggaagagatagacaaggcaaagaaactggacaaagtatcacaatctgaaagtgatgaatttcaggcgttgcttgaagatatggaagttatttctaaagacaaaaaggcacaagaattaaattttgatcaagatgatttattagataaaatagacaaattgcaaatcagtgctgaggataagtttaaattgaaacaagtatgtgttgaagaatttaagaatttggagccagaacatgacaccgataaaacacaagaaaattctgcaagcgataaagttattggtaattttgaaaaccttgctattgacaagaatgatttgatagagttggaattattggctgatgattttgacgattcggagaattttcagggagaaaattacgacgatgatgaagagtgggattatgaatttgatgacgacgacgaagaagaagaagaagacattgcagatgaactattgtatggtggaggcaaggctaagattattggaagtgacgaaaaatcgaacaatatgttatgggatcaaattataaatctaagaaaaagcaaacttgttgccactgatcaagtggccgataagattgaagaaagtacagttaatgagaagaaacctaaagcagtcaggtttgctgagcatttagatattaatgaagtggaaaacattagtgagagtttgagaaacccaccaccagaaactggtaaaatgtccttgtttaagcaaaaccggatgtcttcccaacagaaaaatagatcagaggaaataatggaaacagttgaaaatgattctgtcatgacagatattttggagaatgatgtgatgagtgatatagttgaaaaagagccagtgatgacggatataattgagaaagatgatgatgttcaaatagtggacaatagtgatattattgaaagctccattattgaacgtgagccagttgcaacaataaacgaatctacaccagaagctaaaacaggaactgtctctcaaaaaccagtttcaagattcaaagcaatgagatctagccagcccttgaaagatactgggaaattgaatactcaagcgcctgtgaaaattcctataccgggtgacacagagaaagaggtagtaccactggaatcaccgactagcttatcggtttcaaaactacaagatttacaactggatatggacaaaatggctcaagcttatgtttcagggatgtacgatgatgatatagttacagaagggccagtagtgcacaaactagatgattttgaaactttgaataaaatggtggaggctaaaaaacaagacaatgaaaagttgggaatacaagaatatgatgctgcatccaatgaagtaggaatggaaattgatgaagaagatgaagatgacgatgagggtccaatattagtagacgaaattgttgaaaatgaattggatgaatcaaacggagttttcaatgatgaagtaatctttgatagagaaattcgtgaaaactatcacaaattgcgcaacaaattaatactagatcaaaatgggtttaaaaaatcacagcaagaattggaaatggaacctgtagatgacgaaggtaatccaatcaaaataagtaggtttaaagctgcaaaaatgaatcgtgggggttga

SEQ ID NO: 6290 - DNA, 489 bp, Candida albicans
atgtctatgaaatcaaagataaaatcatttttcggtaaaaacagacaatatgcggttgctggcgcaagcaacaatccatcaaaatttggttacaagattttgaattggtacattttgcatgatcttccagtcattccaatcaaccccaaagaacaagaaattttgggtaaagaagttgtctcaaatgtctcggctatcatcaacgctattgaaaaacaccaggacatttctaattacaaaacttctggtgttgatggtttgagtatttcattcttgaccccacctgcagtaactgtggcaactttggaagaaattggcaaaattgatggtttcgacaaggtcattaagggtttatggtttcagccaggaagttacgacaatgaagtattagaattagctgaaaaacttggcgagtttgacaaagtcgtacatgaagatgaatgtattttggttagaggtgaagaaggtatgatttctgccaacttgtaa

SEQ ID NO: 6291 - DNA, 576 bp, Candida albicans
atgagtgaaagcataacgataacagctaatagcatagataaccctgaaacagatgtgaggcgtaacgaaagattccatctcgttcccagaaaaagacttgaagcgttagtgacaacaagtgggctaatcggggcaatgattggcttttacgatggagtaaagatttcatcactcagatacttgactgaaaacgcacatcgaatgccgaaaaccgtgggtgggtggtatttttatcataaaaagaagaattatgtcatgatcgttgctggtgtcaaaaaggcgattacaactagtttcaaatatggtgcagctgtcggtgggttctttggtttggaatatttactagacattagtagaggaaatacaatagactttttcaacaccacaacagcagcattcttaacatcgaccttttatgcaaaatacaataagttgagctctatgcaaaccagaaaaatgatcttcaaagggacggccttgggcttgacccttggtttaatacaggactatttaattcacgccagaaagggtagagtctggtatttagataggtatacacaacaaaaactcgtataa

SEQ ID NO: 6292 - DNA, 2970 bp, Candida albicans
atggctgcacaaaagaaatacatttgtgccttttgtgctagggcttttactcgatcagaacataaacaacgacatgaaagatcacataccaatgagaaaccattccattgtttacattgtactagttcatttgtaagaagagacttgttacaacgacattgtcgaactgttcaccacactaacctaaaccctagtacgttgccatccaacaagtctttgaaaaatccaaccacaaaccctcttgatttatcaaataacgaaggtacaacaacaacaactaaaacaggcaacaggaaaaacaacagcaacaaaaacggtgctaagaatgacaaaagtacaaacccgaaccctgctgtaagcaatgatgataaccggtcaagtgttggtgacataactactcagcttccgtttcaagttcagttcaatactcaacttccatatcagcaacagcagcagcagcaacaacaacaacaatatccaatacttcaaaaccagggtatacctatgaagcaatcattttctatggaaagcgatcaacattcattgactacttttgattctcccacctcttctttaggtgtttcaatgacacctagtggcagtaccaacagtgagatagttctccaacaacaacaacagaccaccaaacggaggaaacggtctcaagagaataacagcaacaacaatactaaattaattgctaaagaactcaatcatgatttagtccatctactttccattaccaaaaagttaactactttattacagcattacgataatgtcaaagtgaacattactgactcatttctcattggatatgttcatatacagcaacaagctaaaaatttcaccatatttgaaaaaatattgaaagatttggtatactatttgaatacatatcatatcaataatctacaacaacaaaatcaattcccaccaagtcaacaacagaatcattacactataaatcattttaagattggtataagttactgtgtaatcgctcttggatttttaatcgatcataaacccaatagggctattcaatttttcaaaaaatcatggaatttgttaatcaaaacattaattcctcaatataacagcaacaacaatttattagaccagattgagattttgtataatttattcttgttatgttatatctatttacaatttaatctagaaacatttgacatcaatgagaaacaacatgaacatcatagttatgaacaaggagacgagcacgaagatcatcatcaagagcaagtgtatatcaataatcaagttatactaaattacctcaacgatataagttttattattgcttccaatttgaaagatgtggcaactaacaacttgattgatcacaatttaaatttattttggaatatttatatattgttgtccagttatataacaaaagagccaccaaaaattcatcaaatattactaaataaaaacttgaaacagaatgacactttagtttctttgatgcaaaaatttagtaaatcatttattaatatggatatggatgatgaacaattgaaattggttgttgttgcagctttgaataacgaattgaaactttattttaatgatactgttgatgagtttgaacccgagaatagtaagaataaaagaaaattcatttatgataacagaaatgttttgcataatgctattatattaatcaacaaatctataaatttctacaacccttcagctagtttggttaatgatgccaaaatgtttgaattgaaattatttgaattgtttaaaaagaatttaattataaacagtccaatgaaatatcatgaattgtttaataattatattttcattccacaacactattaccattggcaattattaacattgactttaaaagaaattaatcaaaataatgtgatttttaaccaaattcattcaatattaactacaacaacagggtcaaatgtttgttttagttttattgattttgaaaatttgcttaagaattcatttttaaattacaaagctaatccaattgttattaataacaatttgttgataatttcgtatccaataattttcttgagtaattatttaaaccttgataatttaatgacatcaatgggacaaatgaatcaattacaattcatcaatttaaacatttttataatagaatggtatttgattatgatgaaagttttgataattatatgggatgatacattgattgattttgaagataattatatcttgcaaactttgatgtatattttgttggataataaatcatgtttattgaaaagattaaatatcgatacatcaaaacttgaatacgatgtaaattgtgaacgattatcatttaatcaaaaatggttttggattattaaattaaaatttgattctatatttgaaaattggatgaattttttgaaaaataaaaataataatgtaacaaataatagtaatgttacaaataccagtactacaggtgtcactaacaccaaccatgatcataatgatagttatcttcaccactttaatgttaatgtgtctaatttcaaatttaatttaaacaagtacttgaatgaatattttgtcactggagattttaaatttagagaacaacttgatcaaaatgacccagatcaattccaaggttcaatgagtatggatgaggaaccagatttcactactgccatgcaaacatcacaaacaatcaattcatttatgccaatccataaccacaatagtcgcaatcaagtctatcagcaacataatcaagatacaccaatgactagtcgtagagatagtactaacatcaatgaaaacaatattgcacagacatctagtttcatttccaactcaaattaccaaggcagcaatagcaataatatgatcaattataacgagtttcaagatcgtaattataaacgatcaagctcaattacattagggatcttggcacagaccgtaggctga

SEQ ID NO: 6293 - DNA, 612 bp, Candida albicans
atgacgtctgaagttataaaattccctcaattcccagaatttacaatccatatttcattattcatcaatgtttcctctgaaaatataactaccatcaaatcaaatttaatatcagccaccgataatgatcacaacaaatacgattattgcttccttaatactaaatatatcatatctaaagaacatttatttcaaagtatatataaatcattattgaattatactagtaaattaggattatctactcggaatttgaaatcagaaataatttataatttatcaccaattaataatgttggtgatgcattgaaacgatttggtatttctgaagattgtcccaattgtatagtcattaagattattaataacaataataaagaaaattccgaagaaacaaaaattctggagaaagttactactgatttaaaggaaattatagatggagaattaattgaattaaatgatcagtatattttcgaaaatttcattgatttggcaaaattcagaaaattatataaattaaacgatgttgttgatttgaataaagaagataatttacaaggaagattaactagattggctataggtgcatgtatactaagaggttattaa

SEQ ID NO: 6294 - DNA, 450 bp, Candida albicans
atgagtaaagatgataaagatttagaagagatttggaaattgtttcaagattcaaatgaagatgtacagaaaagaagaaaagaaataacaaaatctattcaaaaagatacaagtttgaatgaataccctggactggtgtcgatgatgactgcattagacgagttaatcgcttgctttgcattgggaggtcaagtgaaaaactattatagatatggaacttatgactcatgtacaagacagagagaaaaattttggtttgctataaaacatggatcatttagagaacaggaagaaagaccgcttgaagaatcgagcgaaagggagttgaccaatcgtatcaaagtgcaagaattttataaaaagagattccttgaagataaagccaagggaagctcagaggatatttggaacaaacgtgaggaattattaagtaaccctttcaagaaataa

SEQ ID NO: 6295 - DNA, 402 bp, Candida albicans
atggagaatgttctaagttggggtgatagagagccaacttatattattaagcgtccttattcaaatgatcaattgatcttggggggttattttcaaaaagatgattggacagcagcaactttaaaagaacaaactcaagatattttacaaagaaccactagtttatttccaaagattttgaaagaaaaccccaatggaaataaaattgaagatttggaaattttaagagtagctgctggattaagaccttgtagatatggaggtgccagaattgaaaaagaagtggtagaactgggtaagattttgattcataattatggtgcctcaggttatggatatcaagctggttatggtatggctaataaggcaacagacttggcattaggtaaaagtaaattgtaa

SEQ ID NO: 6296 - DNA, 366 bp, Candida albicans
atgacattagccacacaatttgccgaaacaacccgttattcagtttcaaacacagaattaaaacgtcgagttctacacttgtatcgtaaatatattagaaatgctaatgaatttgctgatttatacgaattagatatgccagtatccaatataaaaactaaaattagacaagaatttgaaagacaaagatttggtaatgatttatccgttaataatgtattattaatgaaaggacaaatggaatttcaagaattgattaatttttggaaacaacaatgtcatgttatgagatattttgatgaacaaaattcttataatgttgttgataaaaatgattttgttaaaaactttttaagaggaaattaa

SEQ ID NO: 6297 - DNA, 327 bp, Candida albicans
atgaccgttgccacacagaagttttactatcaacccagcatcgaggccaacaaacagaaattacaacatgtacatgatgttgcatcattagcattgggagttggttcaggaatattgacattagaatctatgaatggatttatattttatttgataggaataacagtcactaatttattattttacataatatgtggcgaaggcaggccatcaaaatatttcaagaatcctttgcaagaggtgtttataagtggggtttttagtaatatacctggcttcattatgatgtggtgtttagtttatgctttggtaaagtcaagttcatga

SEQ ID NO: 6298 - DNA, 3525 bp, Candida albicans
atgatacgacagtttgcaagggatctacatatcaacttaagaaaatgtcatctaccgtcaacatcaacactacaaagctatggctttgcgtccttatactatcaaggctttaagtcatctaaatattcatttacaataccatacagatcatacgccacttttgattatacaagagctccctccaaggaattggttgccagttttttcgatcatcaatatgtcaaaataaataattggatattcaaagatgaccaatatcgacaatccttcttgaactatctacgaaatcagtcttcttttagcaaggatgaaataaaggaagttgtcgagcttcatggcagattagttgaagtattaaacgaacttcaaataggttttcaatttttagaaaagatgtgggatgcaattttcaatcgtgtggtaactgacgaatccgtcactgctttacaaaaagcgataattgaagaaagagatccacttacaaatgtattgatacgctctgcaagatatgatttgtacaagaaaattatcactcctagattaaatcattcccaaatgtccattaacaagagtgatgagcttatagagattattcaattgcaatcagacaagaatgctggaataactttcaattctaaaaatattgaaaactatctcttgaatgagaacaagaatctaatactgaaacaacaattgattacattaataatctgcactagtttgaagctcaatcgtggattgcagtatactgaaagagactatacaacacagctatatttgattgaaaattttatggcatggaccaaaatgatagaaaacaatgaatggttttgtaaccccgatgctactcaatacgatgaagtattgaaattgattggcataccaccaggtgattatcgaatcgaaaagtacttacaagatattttaaaattagtggagcaggaatatcaaaccaagaatctgtacatattcatcacttcaataatgagaacattggttgataaggctccacatttgacatataaatacttttatttcaaggatgctcaaatcagacagagatctttaaatcgatcaaatgtattgatacaggacgatttgacttataccatgcaggcatgtttaaaatttgatagccaaaagctttttgatttatacaaaaacaaccaagatttgcatgatggtgacgaaggtggtcaagaatctttaatacttgaactatccaaagtgactaaagactggaatgcattgcaaaagaatttcgaaaatatgtacggtagaggaaacttaccattaactgtccattacggtattgcaatgcaagccttgaatacattacgagcagatgaagaattaggcagattatatgatcaattacagaaacgtggattacatttaaattctacagttatggatgcattaatacgatcaaaaattagactacttgatcaaacaaaagttattgaattgtttgaagtatatgccaaaatgagttctcaaggtaaagcagatcctaagagtgttcaaaaattgtttcccttgatactaaagattcctatgcggaatagagaaacgtcagtggtattagattatttaaagcagtatttacaaagggaaaaagagactgggcgaattttcattgatgggtccactttccaaaaggtcatgcagtatgctgttggcataccttcattaaaaactatcgaagcaactaaagcattggtggaagaatacggaaaacaaagcactgaatattatgctggattgatttcagcatactcaaacttagatcaattcgaacgagctgataacatggcgtacgaggcccacagaaagtctaagattccttttggggaaattcaaatatgggcactgcaattgaagaataatatgaggtggaagttacgatcaccggatacaataacatcacaatataacgaaataaagatcaattttataaccaagatgagtttttgttcagctttccaacttttttatgaccaaggaggtatctcgctaattagtgatataatacagagcttgcataatcatggtaagcttaaacaagaattgactattttccgtcgctcaaagatattgcaactccgggatgaaaggatttatactacgagattagacttttggcgaagaaagtttgagtggcatgaaattctaaaagaatttgacgaaatgaatggtaagaacattttgatcacagccagaacttacaggtttgttttagcagcagttttgaatctagatgcaaagtcggggtccaattttgataattctactgatatgttaaagcaggttttgagattctacggattgagtagtgatagcactaaaaatgaccgtttatccttggaagacgacattttgtacttggcaagaatggttattgattttgttgacattgttggcccagaacaaagctccctgctatatttgaactttgtcaaacagatttatgataaattgggtaaaaatcttgacttcagacttagtctaatattgtatgaaggattggttaaaattttcaatgaagataaaatcaccatgaccaaagagtttcatcgattaggagaactcgttgatagctatattaaagattatccgtttaaggaagtcccaatattcccatatcgtgtaactaggtattacggggatatgctggtgagttggttgaaaagccatactccaactcgcgcagatgaacttaagatactccgagttttgcaatctggtgttaaactcgagacagaccaatacaccagtgtattaaaatactttcttgagaaacttgatgatgatgaagactacttagaccaagttttgaagattatggaagacaatttaattcacggaaatttagatgaatatagatcctatcttgaaaaacagttgtgctacaaaatctgtttgaaatacttgatggacaactatggcgacgaagatgctatcttcacatcatatcaaatattgaataatttctatgatattaatgggcctgaccaagttagagaaaacttgaaaagtactaatattactaacttcttgcgaagctcatctggaagacttttcaatatcaaaaccaatccttatggtttcaaatcgatgagtcaccataaatttttggattatttcaacccagaacatattgctcaaaaaggtttatttgcttctaatgacttgatactattactacgaatacaaattctcaaatattgtcaaaatgacaaagacaaactaagaacgtatttcaaaaagcacccaaagaccatgaaatttgtcatgacggaaaagtcaacaattttacctctgaaattcaaaggatttagatcaataattgatgatatttcaccattaggaaatttaaattggaaacaaaatagaatagcgagagctagcagggtattgaaaagtttgttattggatacaaaataccaaatgtttattacagccgacgctaaccaatctacccccatgctaaccaaactgccaaaacacgatttttatgaataa

SEQ ID NO: 6299 - DNA, 507 bp, Candida albicans
atggttgtggggaagtctaatataatactgcagtcgagacatttgtcttctacttcaatatgcttaagattcaatagaagagcaacaatggacaagactgtgttgttgaacgaagctaaacagtttttcggaccaactaatgtcaaaggtgaacattgtaaaaacaaatttttctatccaccacaaaataatagaccaaattatatagtgaatgatggaagacctttagttggtgatcaattcccaacgaaaagaccaggaagaaattccaataatagagaaagaaaccctacagtacaccctttccctaataatatttacacgaaaactgcatacttgataccagaaaatataaaggataaaattgttgaagatgcaactactaatggattacatcctcaagaaattgctcataaatatagtataaatcttttaagagtagaagcgattttgaaattaagagatattgaaagcaaattcgttccagatgtatgtataaacatataa

SEQ ID NO: 6300 - DNA, 837 bp, Candida albicans
atgggatatccaccaaatttcaaaattgttactaaatcattaacagaaaacattttattagcatcaacggctttttcaagagtcgataaattcaattttggtgctcgtatggcggtatttaaatttcctcaatcaaataaaattattttatggtcaccattaccttatacaccacaagtaattgatgttttgacaaaatttaccaataataccaatgaatcaaatttaaatattgcttatgtgataattcctgatcgtgaacataatttagctgctaaatcatataaagaaaaatttcccgggtgtaaattaattggaatggaaggattagatgaaaattcattgaaattggattataaatttataaaactgatgggtaataaagttttaaaaaatgatgaattaaaacaaatctttaatgacagtgacagtggcttgattgttgataattttgaatttgtttatttaccaaatcatgcaaatcaagaattggttgtatttgataaatcatcatcaacattatttgaagccgatttattattcaatttaggtgtaccggggtcaactctgggtgaaaccattttagaacaatattcaccagagttggggttccctaaagggtttaatcctcattctggttggtcatttataactagatatttacaaccatattctaaagttggtcgtttcttatttagaaaacttgttgatataaatcatagtaaacctggattagaagctatttataattcatgggattttaaaactattgttatgtgtcatggaaatattataactaaagatgctaaagaagcatttaaacatgtttttgtataa

SEQ ID NO: 6301 - DNA, 342 bp, Candida albicans
atgtttgaatcattagttagatcaggaggttatgtttggaaattcacttcaagattaaccactacacaaaaatataaattacgtagtcgaatgaaacaagttgatgaaaacatcaagaatatttatcaaggattaattgccatggaaaataaatcaatgggtgaacctacaggattgaaaaaaattgattatttacaatttgaatttcctaaagaaaatgaaatgactacaagagataaatatactacttttaatagacattcgaaaaattatcgtaaaccagttcatcgagtgcctaaatggacaaaattatcatttagagaaaatccaaaatatttttaa

SEQ ID NO: 6302 - DNA, 1161 bp, Candida albicans
atgccaactaataaaccagaaactacaccaggtggtgaaaacttacttgcagcattaatatcttgtactaccgcggcagcattttcagcaacttgtacttatccatttgattttatcaagacccaacaacaattgaataatgaaaaagtaatgaaaaaatggaatatccctggaaattaccccaattcgcttgcacaattatataaaggtgggagtgcattagtcttagggtcaattgttaagaatggaacaagaatcattgcttataattggctgacacaattcatgtccattgattcacataatgggaataataataaaaccacggcaccaagaatagtgattgctggtgttatgagtggatttattgaaactttatggttaattccatttgaaaatgtgaaaatcactatgattcaaaatcaaactttggccaatgaattgaaaagatgtaaaaatttaggatatgatataactgggaaagtcactcatagtcctctgactcatcacaaatcaactaaaccaatttaccttagacaatatgtatctcctcatgcatatttgtcatcagatgttattgatcagtacattaaacaaaaagtgaggtttggtggtgtccctattaaggataaagctttagaatcattaaaatttcattataataaacatccttcattgacattatttggaaccgtaaaggaaatgtatgagttaaaggggttaagagcatttacagctggtacttttataacttttacccgtcagattggtatatcttgggtatggttggcaacgtataatgccactagacaattgattgaccctcataatactaataacgaatggtttggtcataaacatactatgatacaactggtggggttacatttcttatcttcaatggctgtgattatggttactcaacctttggatgtaatcaaaactcatttacaactgaaaaatggtaacctgctttatcgcgactcattatcaacagcatataaattgtttttgcaacaagggccttgggcattgtttaaaggtgccttcccaagatttttaaaagtattgatcagtggtggattgacagccactgtatatgaatacgttgagagattggtagacgttgcaggtcatcaaaaaattttcagtcaagagtaa

SEQ ID NO: 6303 - DNA, 2211 bp, Candida albicans
atgaatcatgatcaaattttacaaactatatccaaaaataatactgatttccctataattgaaagcacaaccttggctgaaattgcggcagatctagatacaaacgccaatgaagcaatcgatggttcccacagcgttaccaagagtcacgataatgaaattctagttaaaaatcatcttaattcatcagtaatacacagaataaaaattaatagtctaaagagcattaatggtagtaaactatatggcaataacaagaatattaacaattcagcaactaatatcgcgccagagagtttcatgctgataaatattctatatcccattagtacaatgtcaattttagcattaatttcgaattccaatgatagcagcaatttggactgttttcaaaatataaattacttttgtaatgaaacaattaatttacgtcagtgtcacttgattgaattggaatgtgaattacaagctaagggaacatcagccgatgaaatacctgagaggaccaacgaaaatataccttcttctgacagccaaaaacattttggagttattttcccgctacctaatcatatttatggattcttcaaacttgaaaatgtcgaaataacatcaatacaggttttattgggaaatgaaaatataagacatgacattgagaataattggttagatattatgtcaagtaatgatctaattagtcgatgtgaaaacctacatcttgatagtgagaacatcaacacaggaaagaggaaagagagtctaagttcggacattgagttttctatgaaaccgccagctcaaataccaaggctgtcatcatttatgagttcatcatctttatcatcttcacttacaatcaaagatgacgaatctaaaaatacaactttaagtaatgattatcagatggagaagaaaataccaagtgaagaagaagaagggaaagatcaggtgttaccacaagtgataatagagaatccaattgattttttaacaaccagatattattcgacattgtattcactaaataacccattaagttattttcctaaaactgcattaccaagatttaagaatcttatttctacttttaaaagcaacttagatatagaggagaacagcaagtacaatgatgaacataccaattccagctctagcaacattatagaaggtttgagggagttctggttaaatgtcgatgcttttgatcgacgtcataatcaaaggtatggcgtatttggtgatgttaatgatggaagtgatactgatatgaataaccaagtaaatgatgaattgagtaacattgaattgattgaacaacaaaagttcaagtcaaaccatggttttgatctaaatcaaccaaccactttatctgaacaccaagaaaactcagagactatggatatcgataacaagggaaatgagaatggaaaccagatacacggcattactatggagaaattatcacaattaattcttgatttaaagattcgagaagcccaattacaaattttaataatatttgagctactaaacttgatgcacgtagaagagcaagaatttttgactaaaaataagaacattcaacttgataaagaagcccaaaaatcaaagaaccaaagtttagtacgtcgtaaacgtcggaagaataaaaagaaacaaccaaattcagaaaaagatatactgagtccagccattatccaaagtgtcgagaccgaaaagcaatttcagctttttatgtctttaactacttatattgacaggttgagtttgtgggatacattatcagtcaaaagtggcggtgctggaatgtatgggtttattggatatgtattagtaccttacttccacaaaaaattacccaaactagttgaatttgttgtcgagagtatgaaaagtctgaatatgaaattagtcagtttaaagagaaagaaaagtgatcaagttgacaccgaagaacatgaacaagtggatacggaaatcgaacatggcacaacaccccaagaatctgatacacctaaacaccaagatgaaacactcaaaatgaaaccaatatccaaatacagaaaagtattactcgataagaaccctcctaaactatccaagtctacaggtatagttgactctgatgatttcaaaccattaatttctttaaaaaaatccaaatcaaatctttccgcaaacatgtatccgtacgtgaagctgatttaa

SEQ ID NO: 6304 - DNA, 1404 bp, Candida albicans
atgggtgaagaaacacctaatcaaactcatgaaatattatttaatgatttcataccattatcattcagaataactgttgcaattcattttggattaatattatggttgatactaaatttgttattaactaatttcacttcaattaatgtattacatttattaaaattatcatatacaccacataattatactcatttagatgatctactgcataaccaagataccaacatcaacaccaacaacaaccataaccataaccataaccaaattgagtcattgggggaatatgctgcatttttacctagtgatcctcatgaaaatgatcgattaattaaaggaatctggtcaaatttaaaatttgtatcaattattaatatcacttgttggataatttataaatcaattgctaatatttcttggttaacaccattattttatacattaccattggtttcattattcatgacaatttataagcttttctttaaaaactcatattcttcacctggtcaaattagaattttcactacgattaaaagaatcattaggggtaatattaatagtcaaaccatgagaactaatgacattttaataagtgatagtttagtttcatattctcgagtgataaatgatttaggtttagtaatttggaattattggtttgatagtaatattggatataattataaatttgaatcgatgatattatcaattcctacttggattcgtattaaacaatgttggtatgaatataaattgacggggaaaactcaacatttatttaatttaattaaatattctactgggttaggaccattgttgattaatgtattacttaaacgaatgttattaaatgctactgaacaagaaaaaaccagtggagaattattacttaaattaaatcatttaaataattggttatattttgcattagctgtgaattcaacttattcattcatatgggatattaaaatggattggcatttagaattatttgatgggttgttcctggtaatttctggaaagaaaacttctcattctgttgtttctgtttctaattatcgattccaaattttaaggaaacaattggcattaccaagatcaatttattatattgctataattattgattttatattaagatatatttggatattaaaattatttataattaatgaagaattgaaaaaagagaaaattaaattcatttatattttttcaacatttttatttggctatgatgcttattcattaggttatgctttaattgaaacattagaaatttttagacgttggatttggtgttttataaaattagaatctgattgggttgaactttataatgatcaagatttactgaatcaagatattgaattggaaactagacttcctaaacaaggttag

SEQ ID NO: 6305 - DNA, 1350 bp, Candida albicans
atgactcaagatgcattggtgataatatgtgggctcttagctcttatgtatttagggatctactcactacactatttccaagatgtccctgatttgtatttacaagaacagtcaatcagagaacccactcgattaaccaatgaatccccgatttatcattctaacaaaagcagcaacttaagagttgggttggatattagatacgattcatataaacttagaagtggaaatttgaatgatatctgggaaattgcaattcaatttgccaagaagaccgatagaggtataaatatcgacaataatttaattaccattggatatattaattattgtattgaaaacctacaattgggttcacacaaagttatttccattcctaaagattataaaattgatagtaaatggttggttgtgttatttgttgggtttgttaaacaattgactgttgagttttatattgacaagccgattgctgatgatgctattgatatttcaaaaataagtttaccatcacctccgcaaggctcttacaagtttattaacaattatacaccagagaaagataaaggtattgccatcagattacacaatcaaatctctcaaggaataaagtcgatagttgattttacacaattgaatatagtcagtggggttgcatctacaattaaacacttgccaaattctgatacttacaggaattcaaaaatggtgattgtatcgaacaattcaaccaacgaggatatcactaacttgattgttaaattattaacggggttaatattgaattgcaacataaccatatgtgacaagttttccgaagtcgattctaatgcggcaattatttccgtcccagaactgaagttaccatttgttagcaacaagagtgatacaattacggaacgactccaacgatatttgttaacaaaaagtgtattcccgtttagaggtaccaaaaaactaatttacatcagcacctcgatcaataagaagtctgccttatcgttgtatgatttgaatacaattagaattcaacatcaagcaagagttgtgaaggaattatgttactataatattgtgggtcccattatccttactgattattatgattaccgacaattcaatatcaaagtcaataaagttgggtgtattgcccagtcgttagaaattaaactaattaatttacaggatgagtgggggaatctactggtccgaggatatactattggtaagactttgaatgttgttaacgaccaacaagaaaagttgcaaccgaaagacaatgatgggtttatgcctattagtatagttaaaggtaaatggggtaatgatggttgtttatatgtattataa

SEQ ID NO: 6306 - DNA, 2445 bp, Candida albicans
atgaatattgacgagtttaagtctggcctaaagaaactaactgtgaataaacgggttattatcgatgatctaactacttttgctgagaaatactcggctgatgccgctgaagaaatagccgcagctattcacgaacacatcaggacgtgccctccacagcacaagctacttgcattctaccttttggataacatctccaaaaccgttggtaacccttacaacattcttctagctaatgggctatatcaactctttaaagacacgtacgttattgttgacgatggtacacgacatagattgatagagttgttcagaacatgggaacactacgaaaacacatctgtttttaatatgcaggttctagaaaatattgagaaatttattcaacaagcacagaatcttcgttcagcttctcctggacttgaaagcctatcaaaatctgaattaacacccagaattcttattcagaatgcgaaagacttgttgaaattacatgatgagttgattttgcaagttgaaaattttgtcaagggagactatcataaatttttactggacgatgatttttgtttcatcgagcaatttaaacagatacaagtacaattgtatgagctgatcaatgagatacttaggcacatttatgaggacgtgaattcatatcataatggtaaagaaaagcttgtcaatactcctcaattcaatattaatgcaggaaaatacaaaatagacattgtcagaaatcaaaaagaattgtttaaacaacaacagtcattaacagattttcttgctacctgcaagccacgattgcataaggcttatatgttgaaaaaagagaaacgagaaaagataaaatacctaaagaaatacagatttgttatagagaagcgtcccaatacaaggtttttctcgcaagttttgaatgaatcagaagagtttattgatttaattgacaagtttggaaaggtcgccaaatttacaccagaagagttattgtttgttaatgaaccacagttgattgaacccccgcaaaatgaagcccacgatcatcaaataaattcgaatttcttgggattccctgttgatattgatagtctaaaggaaccagcaactactcaggataaagcacaagagtctatattgggactttctattaatttagatagtcttttaggctctggcaacaacaaaactagaaattcaaatggatctacagacaaatcacaagatttggcccctgaaacattgtcgttacaattatctctgcatcaacaacaacaagagcaacccatggcaggtttatccattctttcatcattaccattcacctccattttagcacctaccactgatcaacctccatcaatagatcaacctcaacctgtatggagtcagaataacactttgaacagtcaaaatcatgaaaataaatcactaacttctgaccagtccacacagcatgataagcaaatgcaattaaccacccgaggtccgttagaagttacacgaacacgaaatccagaacaggacccggatccacaaccggtgctttcaaccgatcggccaaaacctttggaagaaaatgatggggtgataacatattatccaatttttggagatcaacctagtttggtaaataatgggtctttcagacatccaaggaaagtgtttagaagactggtccaagctcaatccattggagatctcactttgaagtatatccccgaattctttaaacaatatgagatcgatattaatcttccaaattttccaattccaagccggtttccaaattcaaatcaatttccagtcattccagagtttagagtaaatgaaacaaatttagatagttcgtcaatcagcaatggcgaccaagttctacaaattgaatatcacaaggatacaacagaaaatgggaatacagaactagcaaataacggggaatcaattaaagagtcagaagtaccgaaagagcaaccggtgatatcaacaaacgagggtcaacctactgttgaaaatgacacatctgctgcaaatgaacaggaggtacatcctaccacttctacagtccaatcttcaaatacatctactgcaaatgaagaagttgaaagagtgccacaaactgctccggtcttaccaccaagaaaactcagtttgaatgattatagaaaaatcaagatgaaccaagcaaatttgccccattcgccaacatcacaatcattaccacctccaccgcctccgccaccgccaccgcctccacctccaccagcatcttctcatagctcatctaataataaatcgtcagagagatctcgtttaactgatcgtcagtcgtattcaagtttggccattccatctaatcgtcctaaatcaaatttaaagagaaagggaacaaatgatgagccaaatagacgagctaaacaagtaaaatttgccaataatatctga

SEQ ID NO: 6307 - DNA, 1290 bp, Candida albicans
atgggttatccggaagagcttgagaaaatcaaggagttgcttgaggaggcaagtgctacatgtaacttcaagtacatgctcattacacaaggaatctcaccgacaacagatgtggcatttacttattcaaagcattttactcatgaagaagtaaacgactatagagttgtttttgggagatcattcacgagcattcgaccagtattgaatcgtacatacacgttgaagttgagtcgctcatccgacaattgggatgctatcacgagacaacttcatgatttattcaattctttaaatcaaggtgtatgcaaagaaattgctaaattgtggattcgaatattggctcctaataaacaaaaacatttcccctattcaaaaaaggatgttgttcccaattggtggccacgagacgttgtccatacagaaccagaccatttgaggaaagaagatcgaatcaaagttctaattaatgtggtgaccaataaaaatttcaaattccgtgacgttgatactaagtctattaaaaccaaagtagagcatactgaggctattattcatgaaatcatctatattgcctatcttgctggattattttattttggtcatgatcgagacaatgaaacttatgatattttatcttctaatgatagaaagttgttagaacaagacgaaattgagttcgaggtaagtgattttcggtactttggtaatgaaggtatttcacaaagtaaaataaaggatgaatatcttaatgaaaacttattcagattgaaaggtggtaacactgaaccgacaaaacaatccaccaaacagtctaataaagtaaagaagcctcgaaagttatctaaaaagtctagtactaaagcccttgctaaagtgaaattggatttgttagatcctcaggagaattttgatttgcgtattacgccagaggcacagcctcggtcacagctgccattacagttgccccagtcaacaccaaaagatcctgctcctgaatttgagtttccgttccaagacactgcatctaaaagtgatttgatgatgcacactcaaggtgatgaaatgtccttggatccaacatttgatccaaatactggatatcatattgttccaaacactgctcctgactacatgcaaaattatttcaatatgaataatgataactatgttgatccagcggccgcatacatcccagatccatctgaaacttctcaatatattagtcaaggtgtgaaaaagaaatgggaagataagcttgatagcttatttgaggaagattttggataa

SEQ ID NO: 6308 - DNA, 699 bp, Candida albicans
atggagaacatagagaatttgaaattatatataaactcattatcacaatcaatatcagcttatgaatccgcattaagtccattacaaaacaaacaattatccgacatgattctaaatatcaacacaacatcatcaaccacctctaccacttctacatctgaggaacaacaaattcaaatattgaataattttgcatatcttttgatatcaacattatttagttatttaaaatcacttggaattgatactgattctcatcccataaaaatggaattatcaagaatcaaatcatcaatgaatcgattgaaaaatattaaaaatgaaataaatggtgataccaataaacaagaagaagaggaagaagaaaaggaaaaattaaagaaactgaaagaatatttatcaagaactttaggtgtaagagatgttggactgagtgttgatgttaaatcaatgggcacttctgctataagtaaacaaaatttccaagggaaacatataaaatttgatgatcatgataatgcagatgaaaagaaggatgatggtaacaagaatgatttgaaaaaatctaaaaataaaaaaccaaatagtactggtagtaaatctaatctgaaactgaaactgaaactaaacgtcaaggaatctaaaataactaaaccaaaatcaaataaaaaatcatctacaaagaataagaataaatag

SEQ ID NO: 6309 - DNA, 2832 bp, Candida albicans
atgtcgtcaaatttttttaaaaatacgcaaaacaataagggggtgagtttatttggaaacactcaatgttctgatgaaactggtgtgtcttctttcaaaatacgaccatcgccaaacattgacattgatagttccttgggctcagagtttgaaatgggcttggattttaacaaagaagatttacatgagaaatttctggatctggtctttgaaccaaagaaaaatgttgataagtctgagctctccttggtaacaactttcacggagtcgtccaaatcaaatgaaacaagagctagtttgaattcttgtacggatgccagtataattgagcacgaaacagagcctgaaactaagaagggcttggatactcgtactcataagacaaatacattatgtttatttaatcaaccaaagtcgaataaatcgaaaaagactgaaaatctgacttcaactacaaaaatggaaaccaaaaaacttattacaccaagggtttttgatggtaaaacgacgatgcagttggaagaacgaagcaaggctaagactatcagtattctgcgtgaaggtgtatcaaaaactcagccacagtcacaaatatccagcaactttctggcagtgtcgttttcagaattaatcgggcaggtagaagctacaaaatgcaacttggaaaaagaattggatcttactcgaagaaagttactgaaggtggaatcagaaaaactagagagggatcagaatataagaatcttgacagatgtgaatgctcgaactaaaagccaagttgaagcattgttcaaacatgtaactagattggactctgattttaatgatttaaggcatgagaaagacaaagcaggaaagaaataccaaaagattaaggatgacacaaatcgttataaagctaaagtaggtgagctttcttctatccttgatgaatcaaagcaaagtttgaattccatgagaatgcaaatgcaagtacattttaaggtcaaagagttggaaatacaacagaaagatgttcagcttgatgagatatctggcctattgtctgaggagaaaataaaattagctgaaatgcaaaaaatgtcatttgacttgtcacaatgggaatctaaaatgttggaaatgaaccaaaatttagcaacagatatatctgatcggttttttaactcaattaaacagttcataggatccgaaaatttgaacaacagtttggaaagcaagtttcaatttattgagaaagagtttaaaagttttttgtcaaacgaaatcgggtcaaaagtagctgagttgggagcagcttcacttgataaaaatcaaaaattaagtgttttggtaagtactgaatttgagaaagcaactatggctggaactaaaaatcatgcaacaactagagactatttgcttaaacaatttcaggccaacattggattaatacaaaagggtgctttggatgtccaggacgtaagacttgaatacgatcaaaaatttaaactgttggagtcgaagattactcatttggaaacaacgaaaacgcaattggagagagagctttctagtcataaaagtttatcacacgataaaatattacatttaactgaaaagctgcatggattacaagaacaattagctattgctaaacaaaaactcattgattgtgattccactgcagaaagactggcacttaatattttacaagctcaagaagaattagaagcaaaaaaggtcttgttgcatgaaaaggatactaaattttatgagttgcaaaagaatttggagttccaactgtttgccttgcagtcaaaagtaaatgaagaaaacaagaaccgtttattctttatcgaatcgagaaattcattgtcaaaagaagttaaagtcttagagttggttattaagaatcttaccagagattatgaagcctgtcaaagagtaaaggcaactgaaactttggaatgtgataaatggaagatcaaatacgatgacatgaaggagcaaaatgatttgttacaggaaacactaaggaactgttttgctcaaaatcaagaatcaaatgatactgtatcacaactcatgcaacaacatgtggaacagttgaatacaataaagagtgaattgaatgctgaacgcaaaaaaacaacaagtttggaacaaacgaatttgaaattacaatcagaaatagaagccaaagagttgtccatgaaactggaagaggatattaattattgtaaaaggatgtttgaagtagttggtgaaactttaaagaatgaggaggctgtaactaagggtttggaagttcagatcaaagatatttcagagttcatgaagaatagtaatatgatctatcagcgtgacttcaaagatttgtatgaaactttgagttcactaaaatcacaattaaaacattccatggaaatatcatcctttagatatgataatagcagtactttggaaggtcctaaagtaaacactgaaaggcaagttttgctacccctgacaaaccaaaatcttagaggccataaacctgtgggtgtctctgaaccgtcaaccaaaacaacccaaagaattaaaagtagaaagaaaataccaaaatctaaagaattggatatctcacaagagccttataaaacacacaggaagcacacaaatatcggttcaaacttgggagctaaccaatgcaaagatactataacggtggaaaatctgctggatcaaaaggaattggatttgaaaagtaggagttctcaaaagactttgaacaaacaaattgctgaggatgtgttttccctctcccatattacaagttcacctccttctaagaagtccaagaaaaaatga

SEQ ID NO: 6310 - DNA, 435 bp, Candida albicans
atgtttagaactactttattaaaatcattaagagcttcagtatcaaaaccttcaatggtgaaaaccattcaatcatcatcaagatcattattcaccatcaccaccatcactaacaacaaaaatgtcactcctttgacttcatcaatgaactttattcgttgttatagtgccttcccagaattaactagagatattgctaaagaaagaattattgaattattagaaggttatgataaagtagatcaatctaaaggtgaaatcactgaacaaaactcatttacttctgatttaggtttggattctttagatgttgttgaagtgattatggaattagaacatgaatttaatattcaaatccctgataatgaagccgatagtttaaaaactgttggtcaaactattgattatattttagctcaaccagattcttgttaa

SEQ ID NO: 6311-7000 - skipped (690 entries)

SEQ ID NO: 7001 - protein, 547 aa, Candida albicans
MFRKGLIRFQHTLTHTMKRPVSNSIVLTTTEEKIRNVLVGYCDYYNKTNNDSLELRITGGWVRDKLLGNESHDIDIAVNHLTGEEFVNGLHDYLRQHEPELSMNHVHTIKMNPEKSKHLETCTTKLFGVDIDFVNLRSEEYTHDSRVPSIEFGTPEQDAVRRDATLNALFYNLNQGEIEDYTKRGLSDLQNGILKTPLAPIKTFLDDPLRIIRLIRFASKFNFVVESETLNAMKEEHNKSALSTKISKERIEIELRKILTSNNPGYGLQLINYVDLASSIFYVPELAKEFDNESLEEARSQLACHMEIASLIYPNFKQTINNSTEKFKNEFAALMTNDDYKNVFWLSVILHPYTNVKSCKPNRDIFNQYLRLGLTSKKSDIAKVSAINMNSAELSRFFSAPELVKRSDIGLYLRKFSEFASLNLIVNALLDCVRKVDQFTQLPKELPVPFPEVGEKILGDENINKVISEIVSRYENLFVQIENWDLTNVHLVKPLIDGTTLSKSLGMKPGPWLRPTIEEILVWQLDNPQSSVDECFEFVKSIIPKYK

SEQ ID NO: 7002 - protein, 451 aa, Candida albicans
MSGDNTGNKSNSAPSKSIEELLKLLAMGQELSPAQQKEMKDYKFWKTQPVPSLSETVTEEGPIDKLKTPEDVPNDPLPLISDFEWSTLDIDDNLQLDELYKLLYDNYVEDIDATFRFKYSHEFFQWALKPPGWRKDWHVGVRVKSTGKLVAFIAATPVTFKLNKSNKVIDSVEINFLCIHKKLRNKRLAPVLIKEITRRVNKQNIWQALYTGGSILPTPLTTCRYQHRPINWSKLHDVGFSHLPPNQTKSSMVASYTLPNNPKLKGLRPMTGKDVSTVLSLLYKYQERFDIVQLFTEEEFKHWMLGHDENSDSNVVKSYVVEDENGIITDYFSYYLLPFTVLDNAQHDELGIAYLFYYASDSFEKPNYKKRLNELITDALITSKKFGVDVFNCLTCQDNTYFLKDCKFGSGDGFLNYYLFNYRTFPMDGGIDKKTKEVVEDQTSGIGVVLL

SEQ ID NO: 7003 - protein, 301 aa, Candida albicans
MTTMTTEEILASYPQITAPTDQTGYTSNLTPEQKTTLDIFRQQLTELGYKDRLDDASLLRFLRARKFDIQKAIDMFVACEKWREDFGVNTILKDFHYEEKPIVAKMYPTYYHKTDKDGRPVYFEELGKVDLVKMLKITTQERMLKNLVWEYEAMCQYRLPACSRKAGYLVETSCTVLDLSGISVTSAYNVIGYVREASKIGQDYYPERMGKFYLINAPFGFSTAFKLFKPFLDPVTVSKIHILGYSYKKELLKQIPPQNLPVKFGGMSDVSDDDLLLKDVGPWRDPEFIGPEGECPRAYNI

SEQ ID NO: 7004 - protein, 486 aa, Candida albicans
MTTVEQLETVDITKLNAIAAGTNKKVPRVVAAGLGGKLMGTSDLVKVTAEEITKDSMESLAEKDAREKAKYANKKHISEEPWTLDNFAKKINWLNMILVVFIPVFGAYCAWNYPPQWKTLVLTFVMYAFSGISITAGYHRLYSHKSYDAALPVRLFFAFFGAGAIEGSIKWWGHSHRIHHRYTDTPRDPYDARRGFWFSHMGWMLTKANPKNRARADISDLVADWVVTFQHRHYLLLMITAAFIFPTLVAGLGWGDYWGGFIYAGILKGFAIQQATFCVNSLAHWIGVQPFDDRRTPRDHVLTAFVTFGEGYHNFHHEFPSDYRNALKWYQYDPTKVTIWCLSKLGLAWNLKKFSQNAIEQGLVQQQQKKLDRMKNKLNWGAEIEKLPVWTREEFNERAKQEGLIIISGIIHNVKNFIKEHPGGQALVRASLGKDATKAFNGAVYAHSNAAHNLLATMRVAVVKDGEVNADTFDLQEQMMEKEKQS

SEQ ID NO: 7005 - protein, 1009 aa, Candida albicans
MSYNNPNNSNSHLRPHAYNNSRRDDSDGDESSIEFLNQRSNTPLTQGTYNYHNTSTNSLNFQQPEPIYRNQTRTSLSDSYYDHPIFDTSQTQIQPPHDNPFTESYEMTDTSYQGNDHHYRTGQPNHLMNPTYNQAFIPHVYDEEDNDEQEYDQRIQYNQFQGDHFDLAAISYADDESQSQLDYVPTERVIPEGEEEEEEGETSFEKEPGSETISGPFGEERSFEEPPPQQEVRSKKLTRATGLNGHLVLDCPVADELLSKFPDYNPAEKSGGLSREFAFMRYTAVTCGPSNFYRDAYILRPVHYPIPRQTELMIVITMYNEDDILLGRTLKGVFKNIKYLESKARSSTWGKDSWKKIVVCIVSDGRTKINERAQALLAGLGVYQEGLAKSRVDDKKVQAHMFEYTTRVGISKVTDDVVKLTTEKVVPVQMLFCLKETNAKKINSHRWCFQAIGQVLDPKIVVLLDCGTQPSGRSLYELWKEFDRDHRVAGACGEITTSLKKRQMITNPLVYGQNFEYKISNILDKPTESSFGFISVLPGAFSAYRFIALQNDINGVGPLEKYFKGEFLHSSGELDPNDDEFQMKHLMLKEEAGIFTSNMYLAEDRILCFELVAKRGCNWLLRYCKSARAETDVPEGLAEFILQRRRWLNGSFFAAIYSLVHFYKVWTSSHSFGRKIFLHIEFFYQLINLIVSWFSIGSYFLVFRILTTSLGDKALGFAPGKILSVIFLWLYLASIVTTFVLSFGNKPKGTEKFYVTIVIFFAILMAYMIFAAIFMAVHSIQDIYRSGTRITVSLFFQNSEFRDLVVATSSTYALYFLASFLYFEPWHMFTSFVQYILLSPSYVNVLNIYAFCNIDDISWGTKGEVGGKSLGEAKLREDGTFDVSVPISKEQINQSYLDQLEKIRDPAPPEEKVLVTNTEDYYAFIRSMTVLVWMFTNFVVIALVLETGGFNQFVEATDLANLKSNRAAVFLTVILWTVAFMALFRFIGCIYYLITRLGREIKASEHATK

SEQ ID NO: 7006 - protein, 465 aa, Candida albicans
MFPNSPDAFHQVRMMQSSIKASNFKLQSMEFRCHSNNVCEYQMEMLHHLLSVEAKTLPNLSLIEQQPEIKLGMRPLLLDFLMEVITILSLSRSTFPLTVNLIDRYCSTRIVKKQHYQLLGLTSLWISCKNLDSKFKVPTLNDLRKICVDSYYKELFVEMEKHILKSLEWVVNAPTFDAFIDLYSNLLISNSSNFEVANIIKKSSHKIKLFSNYIGELFQFYPNIYYDYTSSQIALIAILITVLTLKIPVDLISLLNFYNGLVKTEMFKSNVEQGAEDQFEEILSVDSFKSLFNKSFFKNLIKIIDNPPSSLKIKYFAENGKYSVLMKQLVTTASNTLKCILDPVPTTPKANSFVKHQQQQHHYHPRPPMSINTSMIPLTPVSNSTSPNRFSPDQIFSENESTPGIAFGTMTPDSQSTSPGEKRSYECIDELEIGTSTIAGYTLKNHDTLKRSKSANYGTLFYLQQ

SEQ ID NO: 7007 - protein, 342 aa, Candida albicans
MTSIKHPKPSTVSASSHGIRTPPTVSTSPDLDVNRIPMVTPKPSTNNLPVTTPQPPPAITQSMRNKSGLPDSLPHVKCLARARIPTTQGPDIFLHLYENNIDNKEHLAIVFGEDIRSRSLFKHYPGETQQDRMTRGAYIGRLTPGRTIADSDGTNELKFDKDGNLIIDSLTYTDPTLVRIHSECYTGETAWSARCDCGEQFDEAGRIMGEAGHGCMVYLRQEGRGIGLGEKLKAYNLQDLGADTVEANLILRHPADGRNFSLATAILVDLGLVEIKLLTNNPDKIVAVEGKHQEVKVLERVPMVPLSWGKDGKNGIKSKEIEGYLSTKIERMGHLLEKPIKI

SEQ ID NO: 7008 - protein, 510 aa, Candida albicans
MLSFKQFRVSTSSLLTRRIRSRHHSSSTFKTAVETAEKLVTPPTSKFSDPFSIVSHEMSNLAKSIANLIGSGHPTLNRVSSYYFEAEGKNVRPLIVLILSKALSKIPLEQRNRIPIDTIDVTEQKSFNGTPTKQNSTIAGKSIDDSLSPLAILHGINPKVILDPLSKPMDKLPIINGHNKPGDKDNSQGQLDILPKQRRLAEIVEMIHTASLLHDDVIDLSDSRRGRPSGNIAFTNKMAVLAGDFLLGRASVAIARLRNPEVIELLSTTIANLVEGEFMQLKNTVLQNNNNDEIFNDGDVKSIPQPTGKVPTKLHQYSVQQQQRTTNGGNGGDSADAAVVVDHEINVEAAFEYYLHKTYLKTASLMSKSCRAAAVLSGAQDDIIENCYQFGRNLGLCFQIVDDMLDYTSSDKTIGKPSQADLKLGLATAPILFAWKQEPKLGDLIARKFNQPGDVEIARRAVEKYDGVAQTKEMATMYCHQALKNLRVLPESEARSALELLTNSVLTRTN

SEQ ID NO: 7009 - protein, 394 aa, Candida albicans
MLWKLLRLFIIIKLIQLAIIYFSPCQFDTSSELIIQNLSSTSSSKSYYNVIITTILNKLIVWDSVYFNDLFINPIQFEHQFVFCPGWIQLIKLLNIKNYYTAQLTSILISNLCHFASVITLYYLTNEMDMKFGLVSGLLMIISPAGVFLTGNYSENLSNLLTLLMFLTYYKSINFNDVKQPSNKSITNILGYIISGIFCAINFTVRANGLLLGVIYVFDLYHFIQNKSSSQIILSIITGSILFMTFLMTNIYHYIKFCPGREWCNNTFPSLFQFAQHHYWNVGFLKYWTPNNIPNFILVLPVLIFNIYSLGYMYQELPKNRKLLPLIVINGLIVVGGTFFWNIQILNRITSFSPLIYWTLAYNLKKPWAKYAIGYCIVWNFVQTGLFAAFLPPA

SEQ ID NO: 7010 - protein, 309 aa, Candida albicans
MYRRAFVGSSRLFSTSSYFRSSYTSAARKTIADIHELYKTGESISMVTSHDFITSQILEQAKVDINLIGDSLANTTLGYDDTNELTLDEFLYHVKSVQRGNSHSLLVADMPFGSFESSIEQATTTAVKLIQKGKIQAVKIEGGNEEIIPTIKKIVSVGIPVMGHVGLTPQKHNSLGGYKLQGRSVDDSVRIFQECLNLQNAGVFAIVLECIPNKLSQYITDKLSIPTIGIGAGPYTSGQVLVISDLLGMKDGHVAKFVQQYNNFFQQGVEGVKQYTKDVKSKKFPNPDTHGYKMKKDVLDEFKEIAKDL

SEQ ID NO: 7011 - protein, 1006 aa, Candida albicans
MKFSHSLKFNAVPEWQDNYINYPTLKKTIYKLQQDQLVHNGNQDQGFIVGTNQTTVSQLVKDFEHIQSTANTTTTTNIKNTNGVEVDDEKTNKHNHPFGDNIIKHRLTKNIISKFKRNNNTNATNNSNNYGSESDLEINQTSLDNEKESETKSFTGELEYTSTSSNGEHDTTTTATKHELILQQILNSNDESYINPKSLTFDPLKIFTKQLIGELIKINQFYNSKESEIFKIYNNLIHDLQNQNINIDDVFKFTQAYNYSDPNIINTDDHHQYHLKSTLSRTVTNASVFDTINHIDNDYDNNNNNQKNNYDLEKQNNTTVAIHDDDDSEDDEEEEEEETHSHDSVLLNHTHFNVKQQLKITLKRKAITLFINLSELKSFIELNRIGFTKICKKFDKTCGYSIKQDFINEFLPQYSRVFENDTIEELDYKLNQIIKIYAFLSNKLTTQSTTKEDLDNIKFELRSYLRDHIVFERNTVWKDLLSLEKKSYNIDLDNSVVQNNKMGDEGHIINSMMNLSMKRINLPQCLKKLIKYDHIDIPQFLLTTQMLKIIIIVIVFIILLAVKTFNDPVQGRCLAVLVAAAMLWASEALPLYTTALLIPLLVVTCKVCKTPGTDDPMDATKASQYIFGTMWNSTIMILIGGFTLAAALSKYNLAKILSSYILALAGTNPRNVLLAIMCVSLFLSMWISNVAAPVLCFSLIQPVLRSIPTDSPVAKALVLGIALASDVAGMASPIASPQNVIALESMNPNPGWGKWFAVALPVAIISLILIWVELFMTFKINNVKIKQFKPIKEKLTMKQWFVFAVTITTILLWCVMQKIDGTFGESGIITCIPIVLFFGTGLLKVDDLNNYPWSIVMLAMGGIALGKAVTSSGLLKTIALALQKRIMHYDAIVVLIIFGALILVVATFVSHTVSALIIIPLVKEVGDSLPKPHPLMLIMGVALIASGAMGLPTSGFPNVTAIGMRDEVGKPYLTVNLFITRGVPASIIVYVCIITIGYGIMSSLNF

SEQ ID NO: 7012 - protein, 510 aa, Candida albicans
MPSSSQVYRSTRSSQPEELSFEDVVMTGLAPDGGLYLPSAIPQLPKDFLSKWTDLSFNELAFEILRLYINENEIPNADLKDLITRSYSTFRSSEVTPLKKLDDNLYILELFHGPTYAFKDVALQFVGNLFEYFLTRRNAQKDLTKQPRDIITVVGATSGDTGSAAIYGLRGKKDVSVFILYPTGRISPIQEEQMTTVEDENVHTLSVNGTFDDCQDIVKSVFGDKEFNDKYHVGAVNSINWARILAQQTYYFYSYFQLQKQAKTTNKVRFVVPSGNFGDILAGYYAYRMGLPVDKLIIATNENDILDRFIKSGEYAKEQEVGVKATYSPAMDILISSNFERLLWYLIRDNVPEVNKSDEKAGQLLNDWMKQLKEQGKFKVPAEVIDAARQVFDSQRVDNDTTVQTIKQVYDKSADKYVIDPHTAVGVTTSYSFIAKDTEPIQYISLSTAHPAKFSEVVNKALDSFDGYSFDKDVLPAELKALSSKEKRIKLIDEASVEKVKQAIKDELKF

SEQ ID NO: 7013 - protein, 369 aa, Candida albicans
MTTDSVPAKFQGFASSNKNTWNKPKLVSYDRKQINPHDVVLENEVCGLCYSDIHTLQSNWGEYNRDDLVVGHEIVGKVIAVGDKVTEFKIGQRVGIGAASSACRECNRCKSDNEQYCAKAASTYNAPDVRSNNYVTQGGYSSHSIADEQFVFPIPDDLPSAYAAPLMCAGITVFSPLLRNLGSDAKGKTVGIIGIGGLGHLALQLAKALGAKVVAFSRTSSKKDQALKLGADEFIATNEEKDWSSKYHDTFDFILNCASGVDGLNLQDYLSVLKVDKKFISVGLPPATEQFGVSPFTFLKHGASFGSSLLGSKVEVLEMLKLAGKHNVKPWIEEVPLSEENCSKALNRCHDGDVRYRFVFTEFDKAFAK

SEQ ID NO: 7014 - protein, 417 aa, Candida albicans
MSVASNPYGPNPSDFLSNVNKFEVIESTLREGEQFANAFFTTEKKIEIAKALDDFGVDYIELTSPVASEQSRRDCEAICKLGLKAKILTHIRCHMDDARVAVETGVDGVDVVIGTSQFLRQYSHGKDMNYIAQSAIEVIEFVKSKGIEIRFSSEDSFRSDIVDLLNIYRTVDKIGVNRVGIADTVGCANPRQVYELVKTLKSVVSCDIECHFHNDTGCAIANAYTALEAGAKLIDVSVLGIGERNGITPLGALMARMITADRDYVLSKYKLHKLRDLENLVADAVQINIPFNNPITGFCAFTHKAGIHAKAILANPSTYEILNPNDFGLTRYIHFANRLTGWNAIKSRVDQLNLHLTDDQVKEVTNKIKKLGDVRQLNIDDVDSIIKDFHAEQSTTNTPLLKPVEDDEGPEIKKQKV

SEQ ID NO: 7015 - protein, 496 aa, Candida albicans
MSSVKYDAIIIGAGVIGPTIATAFARQGRKVLIVERDWSKPDRIVGELMQPAGIKALRELGMIKAINNIRAVDCTGYYIKYYDETITIPYPLKKDACITNPVKPVPDAVDGVNDKLDSDSTLNVDDWDFDERVRGAAFHHGDFLMNLRQICRDEPNVTAVEATVTKILRDPSDPNTVIGVQTKQPSGTVDYHAKLTISCDGIYSKFRKELSPTNVPTIGSYFIGLYLKNAELPAKGKGHVLLGGHAPALIYSVSPTETRVLCVYVSSKPPSAANDAVYKYLRDNILPAIPKETVPAFKEALEERKFRIMPNQYLSAMKQGSENHKGFILLGDSLNMRHPLTGGGMTVGLNDSVLLAKLLHPKFVEDFDDHQLIAKRLKTFHRKRKNLDAVINTLSISLYSLFAADKKPLRILRNGCFKYFQRGGECVNGPIGLLSGMLPFPMLLFNHFFSVAFYSVYLNFIERGLLGFPLALFEAFEVLFTAIVIFTPYLWNEIVR

SEQ ID NO: 7016 - protein, 506 aa, Candida albicans
MTISPNKRQKRDSSSPKKHLILNAFDMMCPSLQTAGLWSHPEDKSRDYNTIEYWTNLAKLLEKGKFNALFIADVLGGYDVYNGPRNLTAAAKSGAQWPINDPHAIVPAMAAVTENLSFAITSSTVSESPYHFSRRLATLDHLTKGRIGWNIVSSYLDSAARNLLNGGPLPEHDERYVKAQEFVEVVYQLFLSSWADDAVKFDRKTRVFTDPERIREINYKGEHFIVPGPSITEPTPQRLPVILQAGASKKGLEYAAKNAEAAFINGMTPEALKVKIDQLKKLVKQHGRNPDDVKVLSLVTVIVAPTHEEAIAKYEEYKYYSDPEGAQALFGGWTGIDLGKYDYDEPLDQVESNAVRSFVESWTKPVPGEDPNTKKTRATVVNQLQIGGSGILIVGDPEEVTEELIRWHEISGVDGFNFTYAVTPGSFEDLVEYVIPLLQEKGYAQKEYATNENGKPLTYRESIYGAGNGFLRPDHPAYNLRWKAEESKEEFEEKLQKTLKEKFGKT

SEQ ID NO: 7017 - protein, 175 aa, Candida albicans
MLGLGGYFYGGKQWENKEETPMPKDVPDVDEVGATSAPLLSASYYIGDKCKPFNEDFLLCKEEHNGGTLECMKEGRRVTRCAISVLKDINKYCFDEFKLHYECLEQNNQYFSRCRSSEGVLSKCVFDNMKLVKKIPGVEQQIQDKKNPIYPSDPNDVKKTAEFLKSKEVTAVEQS

SEQ ID NO: 7018 - protein, 722 aa, Candida albicans
MGIKSEKTDIDNKLNFSGLTLASGPDTPVSNEEPNFIDILHNSKLSDFSSFRYNDYPSQPDINTSEITYPGFLPSVPEAIVHLKLLKAFSVLKRKVIGSNNLIPNEYDVKKWQIYITDASRRFIIFMSSIRSKFGTIESDDEKDIYDNGNTKNEKFILMMKELMPPLDVIMVWHAFLLNPKSMYDVCIRNKIYQFANYPLPLHIIDQFIDDYTFEFHVPQSYKQNYLDLLRSFTNDPLDLLYDNSRIAMNEHLVTLYCPKCHDPMTKPIPITNDENTGFCDTDFQTINIGYENVKCYHGTPSHFTHDELRKLQLYCDMTNSKSLQGTHKYFSKVICPPKFTKRNPFLISDDVCKTLEKHWDINKSLDDILKSLNAKHRRELVRQRILLRNYLQYNLISLTVRGGVQVGEDLVGCVLRQERFVEKMNKLDWLHSPLVFKSLQEAVLRYSRFFEMLTDANLRQMLVPTLDIDLAWHTHQLTMYGYFRDCRGSAVHTVIDHDDKVDEGRLDDGFSFTAKRYKQLYKEEYSVCFCLYCTSKRSDSLRKFSQFFKTKKQTKKEEYLRQSHPLFSRGEGFSHISAHNSVRLPTELASSRREKKPAPWADNTYLLYTTPLLFVVPPIAPITEGQCDFYGNGLCTSATTSCSSIGGTCCNIAPCSGNGGAACFGTGLNPSNYGHARIGGSVVEIGGVCGADNNSTSAGCVGASGCSGGAAGNCTGGGSGF

SEQ ID NO: 7019 - protein, 673 aa, Candida albicans
MERSNKFMDIFSNSNPHTTPLDFSSYRYINTPLDPLPIDTKTVQPPQFIPTINEAIVHLKLLRAFQVMKNKVLIDYETDEEEYCEKRWQSFITLAVRRFILFVSAIRINAPGGQSGPGTESQIFNNANIKQDSFVKFMNDLMPPLDVIMVWHSFLLNPKTFYDTCLRTNVLRFANFPLPLYKLNQFIDNYTFEFNVNPTPQENYLNLIRSFTNDESDYQYDIATKFSLYKQKVRFYCPGCKKVLTDWVRISDENQMGLADRNLSVRTLRSRSFVVEELPPSKCPCINIYMITHESLRILHLIIDARRKYPLLPGTFKYFSSVICNPKYSARSPTTLSEDICLAVQKSYSATKDLTTIINDIPKEYANETTRRRVILRNYLQFNYISATVENGIEVGEDLVGCVLRQERFLEKINKMDWLHSPLIHESLSESLIRYKRFFLMLTADRYRLNILVPTLDIDLLWHTYQLSMYGYFRDCRTSPCHYVIDHDDKIDENRLDDAFARTARRYRHLFKDNYSICYCQYCTNYRTKYANNGLLTLFQTKKKLEIKENAIRNNPLFDGEKQGGVTHISIHNSIQMPTKKATKRRQKNPVPWENNRIDGGHYVVVPDAPITTDHCQFYGTGLCNSVNAQCVSDSGKCCSFASCTSFGGSACVTDSGSACGGDGGDGGGCGGD

SEQ ID NO: 7020 - protein, 460 aa, Candida albicans
MLFLLFLLITPIYAGLIFPTKPSSDPFYNPPKGFEKAAVGDILQSRETPKSITGRFAPLKIQNSWQLLVRSEDSFGNPNAIVTTVIEPVNADPSKIASYQVFEDAAKADCAPSYALQFGSDLTTFVTQAEMYLMAPLLDQGYYVVSPDYEGPKSTFTIGKQSGQAVLNSIRATLKSSKITNIKEDAKVVMWGYSGGSLASGWAAALQPSYAPELSSSLLGAALGGFVTNITATAQAADGTVFAGIVANALGGVANEYPEFKSILQSDTDKKSVFDEFDSHCLADGVIDYINTSFLTGDNKIFKTGWDILKSPTIAKIVEDNGLVYQKQLVPKIPIFVYHGSIDQIVPIVNVKKTYQNWCEGGISSLEFAEDGTNGHLTETVVGAPAALTWIIDRFNGKQTVSGCQHDKRLSNFQYPNISSSILKYFKVALDTMMSNGLGSDIQKDKITPDDLRKFLLGGW

SEQ ID NO: 7021 - protein, 752 aa, Candida albicans
MSEFIVDLFPSEISKLYLFTSFSVLCGAVFFSAKVNKTINSVLVFCWACFIKPLIQKKTKGPNKNQQQSLESFYKNQAHIYDNTREFLLKGRQECLRLAISHLPKKKDLIWIDIGGGTGSNIEFMDEISKISENFKAVYLVDLSPSLCEVAKARFEAHEWTNVHVLVADACDFTIDYDSADLITFSYSLSMIPTFNAAIDNAVSKLDMEGIIATVDFGIQSSDTSMGRINTVGGLVNRDIPWILRNFWRIWFEADKVFLDSSRRNYLEYKFGTVKSLNSYNKALGKIPYYIWIGCDKSKSHTILERLNCLATESPYLAPTTTPIANQLEDIPISKGHEAALINLQKNLPYPSMYYQKEYWRVYYDEMNPLYEQFKNQYIYAFTWEDPREDHKLLNFTSDDTVLAITSAGDNILSYASLPTPPKKIHAVDLNPCQNHLLELKLASFRCLSQEQIWSMFGEGKIENFNDLLIDTLAPHMSSNAFQYWMDKGPKTFSGKGLYDTGFSRWALRLSRYVFKVCGVSKYVEELCAATTMEEQLRIWNEHLKPTLFNPVVGSLLVGNPMFLWKALGVPANQAALMGPSVIKYVVDTLDPIIKRSMISNDNYFYYLCMMGRYTKNNCPDYLTTKGFNRLSSTAATASGSSPIDNLRIHTDTLNEVFGRLKEKSITIAIIMDHMDWFDPNGRDAINEITALKRCLAPGGRVLLRSASTKPWYLKTFKNLGFQEEENVVRQPGSSIDRVNMYANCTVLTLVD

SEQ ID NO: 7022 - protein, 619 aa, Candida albicans
MTQVIEDTYPYLPVYEAVAKESDNDDCQPYFDFITTLKEAKQTDYQSYKYRIDTDFPKIDKLVLRRPTCMPTIPEAVAHLKLLKAFGVLKENVLGCGNDPEKYQIKKWKVFITCAVRRFIIFVSALRDCYSDGSSSRELPFYELQKDASFNETMDSFLPPLDVVMVWHAFLLNPKTFYDVFTREEFIVFAKYPFPLDRLESCIDNESFEYNVSDEYKTNYTNLLKTFTDKANDLKYDVGTFSMHEELVVVYCPQCEVSLSKPIPMTTDRETGFADCQFKAKPQSKNRNIVLHNCYCEDIEELTHDELRKLQLYHDLHNSRPLPNTYKYFSPVLCNPKQSRDPGVASNKVKQAVMKRWSSSKPVYAITKDVDGGLGDYAQSNLICYTVPRGMVIGEDLVGCVLRQEIFTMKMNSMDWLHSPIVLQSVSESLIRYRRFFSMMTDNNLTHMVVPTLDIDLMWHTHQLWMYGYFKDCLSSSCHAVIDHDDKVEAGELDDGFSFASKEYKKRYNEDYSICYCRYCSSHRPEVKLSFWKSSLKSRKKLEREKFSLVTHPLFSLNEGLCHISTHNSIVLPHDAAISRRLESDLPWTKKHFHLQDPANYVVAPSVPAGALIFCKIPM

SEQ ID NO: 7023 - protein, 795 aa, Candida albicans
MSEREKKKLSTKLQSLFNGIYKIEDNGYLIHPTFQTLPLRSGTDYYKVVQNPLSLHAVGRKLKNLKYADAQEFINDLALISWNARFYNHSKSVIYRQAQILKQYITDVVIPKLKNDKAVPNGHSLIYPHIGDLPDDRDNDELSGFSFEKGESTPGPSGASNAGSRRDEFEMSATPQADSMVALSKPLVSTGYTRSSFTTPSRPTRQKHKDNQIESGIRRGRPPIIDKPFETRIKLILKGFKKLRDNNGHPLTKHFEKLPDIKTHGDYYERIAAPISLNEIRIKVRSRKYSSVELFINDLDLMFANAQLYYENDPYSEEFLDSQQFKKEAHLVIQTELSKSDKEIILATSSSSDGVLRFPLEVLEVDGYTYKIGNWVLMKNPADPERPIVGQIFRMWSTEDGKRYVNMCWYYRPEQTCHAVDRLFFLNEVCKTGQYRDHLVDDIVGPCYVIFLTRYQKGDLPEGVIPESAPWFICEFRYNENTHVFNRIRTWKACLPDEVREDPEQPLIPLKETRKLIKYESPIKGLLAPDAYKGMDIPDAIPGTANSPPVSGSVYIGAPLPNDDLGQYISSQNVDAVPEHDETKSGRRAFLFTPISQLKGGGGSTNTVYATGPAVPHGTISHVPAKPIADIPGLTPSVARNTNILINREEKHQLPGSYKSLQEQIQENQAKKQQEQQLQQLQQQQHQQLYKKTSTPTPTSIAPTGTTYHTSMSTYSNLLVGGTLAYGLNESIGELGQFVNKKRKIGNNGKQDEEILFYRAPPLKLVGNKIITNSNVELGHSATYLAWKLKQNKSN

SEQ ID NO: 7024 - protein, 520 aa, Candida albicans
MNYHFSSVTSTSLNRYLFYRSSTNTVSYWSSSQFHIRLKFTTRSNCTTTITTTTTTTALLSRHFYSTFSIFQRPMSTSNNKLSKEISPPPPPPGQDSHSHVHSHSHDSEHSHSHSHSGASMLHHHKHSMHEPNELLAGGASAIKTNPAVRITWIGLLVNVTLAISKGIGGVYFHSQALVADAIHSVSDMLADFLTLATVNVAAKVGTATKFPLGYGKLETVGAFSVSAILLFAGISVGWSSLLQIFEFVLPTHLYEIASHIQIGHDHSHGHGHGPVSVQPDTHSHSHGQIDPSNITTHREIPNINAAWLAGGSIIAKELLYRKTMQIAVQTNSKVLVANAWHHRVDSLTAVVALFTVAGGVLFNVAWLDSIGGIGVSILIIKAGWDSLKEAWNELIDRGEKPGSELYNKIEGIINNELQMNNELKQFKLNQLSVLSSGANTNIHMNLSTTNKNLNLQTLNQYEKRLSDLIRQDDRFVRNIFVKFDQVEEEPEKVEAKKEEDDDDDEKEVNGSNDVHSHKH

SEQ ID NO: 7025 - protein, 428 aa, Candida albicans
MFYSLRTLIISIVIGIITLFTIYTQISNSKSGYAPNLSTFDTSQVQFYDLANYKGSANGWQYDERVLFCVPLRDAAPHLPMFFSHMKNLTYPHNLIDLAFLVSDSKDDTMGELKRHLSEIQKDPKLAFGEIEIFEKDFGQVIGQGFSDRHGFAAQGPRRKLMARARNWLWTVAVKPYHSFVYWRDADVETVPPTILEDLMHHDKDVIVPNVWRPLPDWLGNQQPYDLNSWQESEGGLQLADTLDEDACIVEGYVEYQTWRPHLAYLRDPYGDPEVEMDLDGIGGVSILTKANVFRQGSHFPAFSFEKHAETEAFGKLSKRMGFSVVGLPHYVIWHIYEPSSDDLKHMEWMASEEVRQQEEAKIKKVYDKVWNKAFEDVQNNWDKERSKFLKNTDMSNVRKIKVDWSGVDDFDIDKNSHDDKKLADFNP

SEQ ID NO: 7026 - protein, 207 aa, Candida albicans
MISMTNIFTPIEEALEAYKNGEFLIVMDDEDRENEGDLIMAAELITQEKMAFLVRYSSGYVCVPLSEERANQLELPPMLANRSDRHGTAYTITCDFAEGTTTGISAHDRALTTRSLANPNSKPQDFIKPGHILPLRAVPGLLKKRRGHTEAAVQLSTLAGLQPAGVICELVRDEDGLMMRLDDCIQFGKKHGIKIININQLVEYISK

SEQ ID NO: 7027 - protein, 407 aa, Candida albicans
MTIESTNSFVVPSDTKLIDVTPLGSTKLFQPIKVGNNVLPQRIAYVPTTRFRASKDHIPSDLQLNYYNARSQYPGTLIITEATFASERGGIDLHVPGIYNDVQAKSWKKINEAIHGNGSFSSVQLWYLGRVANAKDLKDAGLPLIAPSAVYWDENSEKLAKEAGNELRALTEEEIDHIVEVEYPNAAKHALEAGFDYVEIHGAHGYLLDQFLNLASNKRTDKYGCGSIENRARLLLRVVDKLIEVVGANRLALRLSPWASFQGMEIEGEEIHSYILQQLQQRADNGQQLAYISLVEPRVTGIYDVSLKDQQGRSNEFAYKIWKGNFVRAGNYTYDAPEFKTLINDLKNDRTIIGFSRFFTSNPDLVEKLKLGKPLNYYNREEFYKYYNYGYNSYDESEKQVIGKPLA

SEQ ID NO: 7028 - protein, 479 aa, Candida albicans
MRFWFAFRDSDRYVYYIIIDKLILFFFFRPLCFFLLSLIVCLLLFYVSFLTSNRLHSLWTITIPPRSPTMTSYSIAFISGVILSIYYYFVLNYFSELKFSEPPYQRYNPLAKDQPKLASNQYLDKIYPPENRKQIGKENATMVMLVRNIELEGALESMRSLEDRFNRDYKYPWVFLNDEPFTEEFMEKTTLMASGETFYELIPVEDWQPPIFINETKLQENLDNSKTNVIYGGVRSYRNMCHFNSGFFYKQKKLLNYDWYFRVEPNVEYMCDFQYDPFEFLRINNKIYGFIIAITEYENTIPNLWPTVESFMKKHPELLHPNNAIEFLTSKEISLNHYMDLIPSATDYNLCHFWSNFEIGNLNFFRNESYETFFQYLDHTGGFYYERWGDAPVHTIGLSLLADKDSIHHFEDIGYYHAPYLACPSADDVLASKRCVCVSRQSEDKINRTIDTNIYSCLPRWWKYGSGKRFLNQIDYKRD

SEQ ID NO: 7029 - protein, 506 aa, Candida albicans
MLSASTKKLLSRLPIGRSPSRKIVLHSSKLFSTSSKSYKPLQPEKTSGSNPALTFPCLDKLERKNEQLSKGNLKSSSTSLESGPEPSYGNVKTGFHVYKSKKPIFLDYGGHLPEYEIAYETWGHLNKEKSNLVLVHTGLSASSHAKSQPENPKNGWWENFIGPGKYIDTDKYFVVCTNVLGGCYGSTGPSSIDPANNEQYATRFPILSVNDMVRAQRELVKDQFGIDKIHASIGASMGGMQSLAYGWEFPDEVEKIISISGCARSHPYSIALRHTQRQVLMSDPNWNRGFYYNKIPPHVGMKLAREIATVTYRSGPEWEYRFGRQRADESRPPALCPDFLVETYLDHAGEKFCLEYDANSWLYVSKAMDLFDLGFKSRSKALEARSKAELSYSGKVSSDIPKLAIPETPYQEKSTKAITTVEEGLLDLKKGMSRLANKDVLVVGVESDILFPVWQQREIADVLMENSVSGKVEYFELGNDISSYGHDTFLLSLNDIGKPVKKFLEE

SEQ ID NO: 7030 - protein, 768 aa, Candida albicans
MASIEQDDLFNVQDDEEEDIEEEEEEDEDVEDQVEIEEVGENVDASQQEEQEEEDDSQMDIDTEDQQQQEEEDEEEDEDEEDNEEEENEEEEGDEDEEMADEDGENEDEEGEEEEEDEEDTSNKKDNKDIEATTKPSLEKKSNDEEKTETKSTPESQLPSAAIDESKDNDGDIFLGDDTTKQSDIPTPKDSNVDNSTSREGELPDDSNKKNKDKPIEQPRNEKGQESENTKLEESKDKEPLIEDGPKDQIQEDLDTNLSFREQIIRKAQRATEFDIIPQVAIPYANQCHTLAFTKGPKWILTGGEDGFIRKYDFIASIQGKSPLTMAQKHNLFSDSLTNAGVICSYWENEQPLTRKQLMNQNSKLKDSDFSTGSVSYEPKINPVYALDAEKNGYWCLSGLLSGGISLYTMRYNEGAIHYYFHQGSKENKSRGHTDAISVIKLNQEQDKFLSGSWDKTIRQWDLNTGRTVLEYTGNSGQISNIEFRPDGLSDVTFVVSEEEEEKEEEIQKKEKLNNKSGENLVNSNDDIDSLFGDSDKDEEMTDANKKDERLEEETRKVVESIDKPKSNNGATNKTHLNSNIFMSSSIDGTINIWDIRTSSPVIRLGVSEGTPPWCMSSTWSNNGDFIYAGRRNGTVEEISIKMPHKRSNMGHHRDTMIPNISKLLQFPKISGPVSAISTMPNDDFLLCGSNDNIRLYNLKLYDELNNVSINSKKQATPFLIVPGHHGGMLSQLYVDETGRFMVSASGYRGWGHGNYTDTVLIYEIDFQ

SEQ ID NO: 7031 - protein, 913 aa, Candida albicans
MLLLDILSIGWQIIIQTGTNGLGEDYTNGDNDGKKPDPIHSVGPQRVFTTQLVLTLIAGMFSFLLFCMLRFKWPHIYAVRTLRQPRNNSHILRPLPNNLFGWIKVVYKITDEEIIACSGLDTFVYLRFFKMGIKIFLILSISAIFVLSPIRYYFTGNYDKENIMTKPNQPPDINYDFPSFYWVYPIFTYVFSIVVFYYLFEFTTTILRTRQKYLASQSSITDRTIKLDGIPKRLLQREKLKKFIEDLGIGKVLDVKLIYNWTPLEDLLHKRQELMNNLECIYTSMYKMDIDIYNQHEVPAVNPIWSEPLDKPQLNELANKYTQELIELDGEIKHMQGKFDSDLSTIDVKENREFKQVPSAFITMDSVASAQMAAQTILDPRVYKLIASLAPAPKDIIWENLKLTYFERKIKSYFITLVIVLSYGFIIFLVIPLTSLLDLKTISKFWPALGEFIGQSKWLTTFVTGILPPLLFTLLNFSFPYFYQYLSQLQGYTSNSDVELSTLSKNFFFIFFNLFLIYVAAGTFWDYMSYISDTTKIAVQLATSLRRMALFYVDLILLQGLTMFPVKLLQVSDFFLLNVLGKLFYFKRLILKTPRDYRSYYFTPQIFDFGINLPQHILIFMIILIYSVVSTKIVTCGLIYFILGLFVYKYQLVYNFVHPPHSTGKVWPMIFRRVILGLIIFQLFMCGTLALESAILLSILCTPLIFITMIILWNFEKYYVPLNTFIALRAILNPYDFEKVFDQDDQSFSSTSNANSNDESDTSAILDDLDLDLDLENDPIDESSCLLENGGDNGNGNDHGSNGEINNGSITKSSRQNNGEPTISRRKSTLDEEREEFTDYTYPGLIDPLDGPWVGFTGNFVKMIEYKSLRLQQQALLEEGRNVRNENEAAIGTTFINEQELVVNKKLSVSEWE

SEQ ID NO: 7032 - protein, 268 aa, Candida albicans
MDFMKPETVLDLANIRQALVRMEDTIVFDLIERSQFFSSPSVYEKNKYNIPNFDGTFLEWALLQLEVAHSQIRRYEAPDETPFFPDQLKTPILPPINYPKILAKYSDEINVNSEIMKFYVDEIVPQVSCGQGDQKENLGSASTCDIECLQAISRRIHFGKFVAEAKYQSDKPLYIKLILDKDVKGIENSITNSAVEQKILERLIVKAESYGVDPSLKFGQNVQSKVKPEVIAKLYKDWIIPLTKKVEIDYLLRRLEDEDVELVEKYKK

SEQ ID NO: 7033 - protein, 504 aa, Candida albicans
MYKQILTFLILFLRYILSEFPDDPYEDDDTSDDNNSDYEGQKCNPYRDKACLVNDEALGKKIFESFAEGTKYFTITSSTRGVRFGSEGLALTIQDEFDNPALVSSFYIMYGKVEAEIKGAAGKGIISSFYLQSDDLDEIDVVEIFGSDPYEFQTNFFIKGNTTTYDRGRYHEMHPSPLSEFHKYGIEWSPDLITWYLDDKPVRMLGRRNKHGLPCSPMFLKFSLWSVEDDDEGTIAWAGGAASFSEGPFTMHIKNLKVQDYSKALTYSYGNLRDGNWLDLRADGGYLYEGHKYCLPPKMLDKLKPTPKQETDDDQVLTSSKSQRVATTISEDKNTVSYYPPSATNSHTTWDRLSEWETEQDETGTDDTENSDNEEEESITAIPISKSRKGSTRRLDISTQLPPLSQNESKIAEIKNITTTKHIHNTTTSLQISKIKSKKVGVTTTIYSSSTPQSTSKSRMPYNIFFNYPGKENSRFKSGVSSILATSFSSVVIAEILVIVVLLL

SEQ ID NO: 7034 - protein, 439 aa, Candida albicans
MSQDLIETTATTTKIVEARELGHQIHDSLLEQLKLQQEELLQQQRDLFFQEQQLQLQQQVTQPVSNNGNTWSFTQGLVIGQVSVIFIIIVFVKFFVFADSSSHIPTKPGLDGATGVIVKRNKNKKHSNGQFANDGENEDDTSLDSNQSKISSILEKTYYDVNNHASESLDWFNVLVAQTISQLRSEALLKDNIYHSLNNFLTNAKLPDFIDTINLTEIDIGDDFPIFSNCRIKYGEDLKRLEAKIDVDLSDTLTLGIATKLLLNQPRPLTAVLPVSMTVSIVRFSGCLTVSLINTKDIDLKNVDKTSNMNGYSKENANGDGASSSNNDEDEDDGGTALMFSFSPDYRLEFIVKSLIGSRAKLQDVPKISSLIENQLRTWFIERCVEPRFQVVRLPSLWPRTKNTREPVTKKTTTTPSTTVNGTSAATVTTPGEYVNSNI

SEQ ID NO: 7035 - protein, 606 aa, Candida albicans
MSINFLSIPRNRFKAIGVLSVTCILIYVILHSSIITTDFDVSDYGDKFIPSIIFDDNNDNGENLKDPQPELDNDKGNGETDTTTSNSMTTAHTFWKGIFDTFDKYKMDLGQDPENAVSYVDKLKQKQGPLNKEVLLSKAIVSSELMKHLKEKHSGVVEDLPSVMPGSVYNKGSKGVVIIGGGKFSWLAYLALVQLRNVGSKLPVEIVMPSRADYEKELEFCENTLPEMQASCVVLPDVLGEAVMKNRKFASYQFKALALVVTSFEHILLLDSDNMIVSNPDEIFESKLYHQYGMITWPDYWKRTISPLFYDVAEIEVNENKRVRYNRFPLYNAPNVRSNIYTDQEREEVPFHDLQGSIAELSTESGQLIINKHTHGKTILLALYYNFYGPNLFYKLFSLGEQGEGDKDTFVAAAVVTRQDYYQVKSFIKTFGYADSDDKFQGVSMGQRNPLIDRKHYEDHVLALLEKDSFKSSSIADQIEQMKKFENEDFDQHNSIPLFTVHCNYPKLDPKLYMSRDDLYDKKEKKLKYRLYGNLKYTKEVVKDGETGTEASTDKVQIDFELQQWQHMQDILCLKKIYFTHFIDNDMNELCQFIENQVAWLSKSQN

SEQ ID NO: 7036 - protein, 193 aa, Candida albicans
MNEGFKYAKNLTYTLFDHLEKSGNLQVKQQQQQQQEATPKDNNSLAIWTSVKRRTIETTQFFAAKNIPIRHRVQLSQKNPGITGTLTDDEIREKFPIEYAQYDHSPYHYRYPRAESYHDLAIKIEPLILEMERMSGDLLIIADETVLQVFYGYLMSCSCDEIPNLNFKPNEIVEVKFNAYSNSAKRIPIKDYS

SEQ ID NO: 7037 - protein, 299 aa, Candida albicans
MIFNYLLALFQILVLASARAQADEYASDPNIFELTPSNFDKVVHKSNYTTLVKFYAPWCGYCQKLQPVYHKLGKYINKDAKYSINIASVNCDKDYNKQLCSQYQVRGFPTLMVFRPPKYEKGKQVKLQKHASEVYQGERTVKSITKFLTSRLKNYVKKFHNIRSDGIAEWLAEDIPSVLLISNANSVSPLLKSIAIDFLDRVNVGMISKFNDESHKFVIGDKEIEVPATSKSSLFYFNKEKGELVAYTKSDKLNDKIKITEWIIEQTQQQPIEGPLSKKEKKYYYKYRTGKKKIEHDEL

SEQ ID NO: 7038 - protein, 374 aa, Candida albicans
MSVKRFFSMNAKALRAFGSTVTSTASGFKPMPMTVSNAADTLAKARSSKPRSDWTKDEISKIYNAPLMDLIFNAQLKHREYQKPAEVQLCTLVNIKQGGCTENCSYCSQSSKHDTGVQAEKLDLDAVMDIARDAKARGGTRVCLGSAWRDMQGRKSALDKISKVVKQINDELKLETCVTLGMINEKQAEILKQNGLTAYNHNIDTSREHYPNVVTTRTYDERLETIKNVQKAGIKACTGGILGLGETAQDHVSFLYTLSNMSPHPESLPINRLVPIQGTPIVEVLKNAPKERQLEFDAILRTIATARLIMPESIIRLAAGRYTMKEHEQFLCFMSGVNAIFTGKRMLTTMCNGWDEDIAMLKKWGLKPMESFTK

SEQ ID NO: 7039 - protein, 287 aa, Candida albicans
MNKHFIRSFSQSGVVLRPGYSTVNPVHHLVKVEKSKLRPGLKELLLPKDDIRSVKFKPTEISQDRVNEYYQNALQSDLLLHLYEHDAEPIIGNKKRSWGTDTPFKLYRPLRKPVGSTRPTKNIYPINNKNVPKLESIVVQSYNKNALESPWLNITTRLQLATITNVKPKILYGKSNILPWKVRVGRACGAKVELFDRDMSQFISTLTELVLPRIRAFKGIPRTSGDKNGNISMGLTPEDCQFFPELEHFQELFPNLNGLQITFKTTAQTDNHAKTLLSCYGFPFSKN

SEQ ID NO: 7040 - protein, 505 aa, Candida albicans
MAVSLDPRPTIFTSSHHEIIVVTLICLAQFFTQAGITLSLSTMNIILKSFDTINSAKQVWFMGSYALTVGTFILISGKLGDLLGLKLIFVIGWIWTTVFSAITGLSNYVSVEFFIICRALQGIGFALLIPCGMGILGNIYPNGERKNLVFGCVGANGPAGAFFGAFIAALIAQLWWWPWIFWLLSIGCVVLTIISMIYIPPITHHKLESYSEFFKRIDPLGTLTGIIGLILFNFVWTQGPVVGWNTAYIIALLIIAVLSIVAFFIIELYIAKYPLVPKSVFNLKIGMVLACISCGWGSFGIWQYYYWNIILNLRKYTPIAGSLTYVPFLVMGIIAAIASSIIISHTKPSYIISFSTICFMVGCLMLSVTPIQQSYFRLTLGQMFILCWAMDMSFPAASIILSDYLPNHHQGMAGSLVSTVINYSVSLFLGMSSCVETEIKLSTHNVLLSYRSGLYFGIGVASLGIFCSLIFIFVQRNDGKGTNALLVDSEEEIIRESTEDVMEKK

SEQ ID NO: 7041 - protein, 488 aa, Candida albicans
MVSSDFENEKQPDVVQVLTDEKNISLDDKYDYEDPKNYSTNYVDDYNPKGLRRPTPQESKSLRRVIGNIRYSTFMLCICEFAERASYYSTTGILTNYIQRRIDPDSPHGWGAPPPGSPDASAGALGKGLQAASALTNLLTFLAYVFPLIGGYLGDSTIGRWKAIQWGVFFGFVGHLFFIFASIPQAIENANAGLGLCVIAIITLSAGSGLMKPNLLPLVLDQYPEERDMVKVLPTGESIILDREKSLSRITNVFYLAINIGAFLQIATSYCERRVGFWLAFFVPMILYIIVPIFLFIVKPKLKIKPPQGQVMTNVVKILSVLFSGNFIKRLWNGTFWDHARPSHMEARGTIYYNSKKKSAITWSDQWILDIKQTFDSCKIFLYYIIFNLADSGLGSVETSLIGAMKLDGVPNDLFNNFNPLTIIILIPILEYGLYPLLNKFKIGFKPIWRICFGFVVCSFSQIAGFVLQKQVYEQVCKLSEVFFTLIV

SEQ ID NO: 7042 - protein, 404 aa, Candida albicans
MLRLSIQRTYSKTTIPQISRSCVSFSSIRHNTTTSSTNTSSSTTPITIKTNSSKSKTNGTLVDSNKFLRTTYESIDDYGSYKHNIFTHRLPESSAKQSPPLVALHNRLQLPKSFKLATLSQCLNLITKPEESDGLANNFGLNTLGKSLLSYYVTEHLLIHYPRLPMKIHQAAVDSLMGNLALSEIGKTWGIEIDEVSKLDRFLGQESEFMKFGRLRYLYDQDKSDKFYNNNGNYKNVSGIEEVIDEQGKLSQQDLAYASAVKAIIGGLYTHCGESAAKDFINDHILSRKIPLDQMFEFKRPISELIRLCDKLEFKQPVSIRLIAETGRLSAHPQFLAGVFVGNDKIGEGIGSSLKEAQIRASINSLLGYYLYSPISANGEPIKEPSDSVDYKFEGMIGLGDVAV

SEQ ID NO: 7043 - protein, 874 aa, Candida albicans
MLYRVSGFYKRHTRNFTNIDYGYYIRNFIHHIASKIYPYAKVVLPNFRAAHYFYILTLVILGSILVYPVKTCAYIDVLFFTAGASTQAGLNTVNVNDLSLYQQIVLYLLATLATPIFIHGSLLFVRLYYFERHFDNIKERSLMDYRMRKSATLARLGSAPTMSSTRLNTFNNQVLGFQEREAEKGSSLSPQSSSSQTSQPVSTAYNDQGGNDIEHHSEPSDSDDDESGNGPVTFQEKIHFEEPQRPRSQRRHSRTDSGIKFSALPHPRRRKSIDPEDMYRSINMLQEHKKNQEAKSKGIQFLNIGSPVRRKSRSSNIEAFPEEDTNPSRDDEITPATNSVGTGNNDEDEDDILIIKPPIEIENSDGANPIFTKKKKLASQIQFKETPGKAKKWITTKTRKHYNPWTSKLKKTLSNSSKKGSLSVVPTDTEDDSEDEEYASIDSETSDISDNEHAADNAEGSDVDSVGSYEEDEDEDEHNSDDDDDGEGERRLGNGASLTKAQSHLVLPSKDETGGKKYTKRSNTLDTPQQNTSDGRKIRKKAPKRKTPRTQRNASFNQHSNVSIGDGSIENVDTNDSYQRLSRTMSGNYLSWTPTVGRNSTFIKLTDEQKEELGGIEYRAVKLLIKIIVVYYVGFNIIPGVMLSIWIYCMPHYKNLMISSSISPAWWAFFTSQSSFNDLGLTLTSNSMMSFNQNAFVQILCSFLIVIGNTGFPILLRFIIWVMFKTARPLSLYKESLGFLLDHPRRCFTLLFPSVPTWWLFFILVVLNGFDLVIFCILDLHDDTFKGVDMGYRVLNGLFQAFCTRTVGFSVMDLSQLHAATQVSYLIMMYISFCPIAISVRRTNVYEEQSWGYMPRRMQRVLMRVRHQTMLGRI

SEQ ID NO: 7044 - protein, 272 aa, Candida albicans
MRQKYIRVKIITDFEKKKPKKKFRESSNTKLNYILQAIRRIPYFINTNIEMTLNITVLISGSGTNLQALIDAQKNNQLKGQITQVISSSETAYGLKRAQQACIPTKTHVLKTYYKGTTKDQTDVRKQRREQFNVELANLLINGQIQGSDASYTKPDLIVCAGWMLILSPSVLQPLEKAGITIINLHPALPGAFDGTHAIDRCWKAGQDGEITKGGVMIHRVIAEVDRGTPILVKELDLIKGESLEEYEDRVHKVEHVAIVEGTNIILEELSK

SEQ ID NO: 7045 - protein, 391 aa, Candida albicans
MAKSLPLNSRSKTTALKQPRELFSYARDIDGKYVYDDPENSLSYYYLPDSTIDTGIDLQGGYSKFKKIPDEQNLADFNSLLKAIIKYETSEGKKISSDIITFREIMTKILSLPYNLTDPIDLYVVPFDGQLFIKSDDELDMKRRKEQEVRMKQTNTVERYDYMKRCEYVGYKFETIATIPKPWSQVSRSQIENRNKKVVNNYEQYLSVIRTGIGNVKLVLAGEIDCCWDYLPDEQNKKLNHYVELKTSRIIENNSQVVSFEQKLFKAWCQCFLMGVTKIIYGFRDNNLILKNVELFNTEEIPILIKNNPLTNAATEKKINCTNALKWYGAVVDWLNTTVDKKDEIKSYRLKYDPVRKSFTLSETDSETNEKLRNGQLLTPEFTEWRQSLKK

SEQ ID NO: 7046 - protein, 314 aa, Candida albicans
MGPFGLGWLRRNTIIVLFTTCISYPLSLNRDISKLAKASGFALVGMFIIVVLTIFRAPFVSPTIKGELTVKEWTVNANIFQGISVISFALVCHHNTMFIYQSMKNPSLAKFSKLTHISCLVSMIFCMIMAINGLINFGDITKGNILNNFKSNDNWINIARFCFGLNMLTTFPLEIFVVRDVLKEIILAKKASVDGSTADLELSSKQHFFITSFLVFSSMSVALFTCNLGMILELVGATSASLMAYIIPPLCYLKLSWNQVDYKSAMPKEKKKFIIFKAIPSIACVLFGFAVMFISSFMTIKNTSSDGGDHCVID

SEQ ID NO: 7047 - protein, 716 aa, Candida albicans
MAAHPSLWYRDKDSLRIGGVARYTIEYTRLDPTIKRIYFRLKNIEKSSIRAIHLLSGPFILYCHVVPCNYNPRKPFHPENVQKNTEVVFENQIKPNQAFNVSLLLNSNSLKGKDDKGYDIFQWEIEIVSQIVITKKTEVVYDFMIGDDLHFMKKLGQSIIQQTLTSLGTKIDMNEGTKPTIVDKAMDEIHNDSHKIYNTQLKVSKLTTDDIWSNEPKDPKKPVHLVIVTHGIFSNLTADMLYIKDQLELRVKENILVRGYRYNAGRTERGVKKLGTNVANYITDLIENSLYQYDKISFIGHSLGGVVQLYAIKYILMTKGPDYFERMRIKPVNFIGMASPFLGILNEMNFLISWVLDMGTLGKTGRDLTLSKRLPAWSDISIGESKKRDSFKPVLETLPEDPLQKFLTQFEQLVVYANAMNDGIVPLRTSALLYLDYEALGDVSELKKSKHMHVHPELEEADHKIQVNRSRDTVSEVPEEANQMVQDIQDAAKSTDNSQSTESSETMGKNHVISRYKEFLNLNFSEHNSNNHKPKLTKRQRKYKNFSVRGTDYNVFNDVLPEDHSFQSEETNSTQDSQTIVVPPRASAIESAINTLICPIPSNEFLINPESRQHVIFHDKYYQFNKSSQEEGNLNKHSKVEWFASVLLRYHSKWKLEKQKQIADKYHNACGWRKVLVNLPLDAHNNIVVRRRFANGYGWGVVDHLCDLFRVSENKL

SEQ ID NO: 7048 - protein, 358 aa, Candida albicans
MKFSQVATTAAIFAGLTTAEIAYVTQTRGVTVGETATVATTVTVGATVTGGGQGQDQVQQSAAPEADDIQQSAVPEADDIQQSVVPEAEPTADADGGNGIAITEVFTTTIMGQEIVYSGVYYSYGEEHTYGDVQVQTLTIGGGGFPSDDQYPTTEVSAEASPSAVTTSSAVATPDAKVPDSTKDASQPAATTASGSSSGSNDFSGVKDTKFAQQILDAHNQKRARHGVPDLTWDATVYQYAQKFADQYSCSGNLQHSGGKYGENLAVGYADGAAALQAWYEEAGKDGLSYSYGSSSVYNHFTQVVWKSTTKLGCAYKDCRAQNWGLYVVCSYDPAGNVMGTDPKTGKSYMAENVLRPQ

SEQ ID NO: 7049 - protein, 790 aa, Candida albicans
MELSEGELSHTSSSSSFVPVDQRQLQDAIQIIDENKHFNTGILDYINKTSPADVGNNYHIISVFGSQSTGKSTLLNRLFNTNFDVMDESNRQQTTKGIWLAYSPVVSTTLGHTTSKSNILVMDVEGTDGRERGEDQDFERKAALFALSTSEVLIINIWETQVGLYQGANMGLLKTVFEVNLSLFGKSKLETHNDHKVLLLIVIRDHVGVTPVESLAKTFTSDLQNMWSSLAKPAELEHLQFADFFDVTFHALNHKVLQPKEFGEGINRLDDRLVVSNELFKPEYHHDVPIDGWTMYAERCWEQIETNKDLDLPTQQILVAQFKCDEIVESVFQEFLAKYQHHFKEVDAAPDFEELGALFADLRQDAFEDYDASASRYNKAVYEQKRKKLRWLINDKLKEVFDVHAKNLCNTLLEKFEKDLVALKGKDFAVNVKTLSTKLVEDVNFQVSLMSLQGDLSLDEIILALTKDIDAIVAKQQVIELNSIVNKSVKKLSASLSKSIQFELGDPNEETWDNVLQQFKGVYEKFGGDFGLGTSSTQNQQAIEKFKFKSWCQFYDVTHKLISREKLLALLQDRFDDKFRYDENGLPKLYLNEQDLEKTFAVAKQHALQVLPILTFAKLADGSEIVPDYDIFDSKLREQFLGGYDDSDDEEDHCFAEIITEQEKSEVLAKFKKEVDAKYIETKRSIVQHITQIPYYIYLIILVLGWNEFMAIIRNPLFFSLSIVLGATVYVLYYLGLLRPALVVAQRTMDEVIVMAKTKLREVLIDDHEVTGRQLNKMAGSKENIELDDM

SEQ ID NO: 7050 - protein, 395 aa, Candida albicans
MSQNADEYEALTATLSSFYNFFRHQFEHIIKPRLIKFRAMTEKERALLPWYEAHTGELKQCIEVNRGFTELLSTSIANDWGVAGTSLDWHPAGPREFEITSTTLLQLMREWSDEGQAERDVAFTRIISELEELYPDEPSRQSIRILNPGCGLGRLVMELVIRGFWTQGNEISYHMLLASNFILNHSQFPHSHSIFPFLSRSSHLVKRKYQTRGITIPDVAPFAVLSELKEKTPSIAYEELMSITAGSFLELYGPNKPSDTLNDPAAIELKNSSKDSFDVVVTNFFLDTASNIIEYVRAINHVLKNGGRWINFGPLLWHFEGDYNVSYINREDNVSIPDIKKGLELSREDLLELIKNMGFDFVKHESDIESTYCKDIKSLGSFVFKCEYWVCIKVR

SEQ ID NO: 7051 - protein, 644 aa, Candida albicans
MSLLARVLQISSDKHSTKKSSSASTTITPVSSRTSQVSKSSSSPPQSVNQSPHSAYTLSINIESPPIVLYGAPGDCTGSIISGILKLTNEDSIELENVTLSLVQTMQYTKPFTLPNSSSVSGCKKCNTRVTDLARWDILTVATSFPPGEHAYPFSHLLPGSLPPTSKLGSLHSQSFIKYELVAVVTDTDGKVKKLVIPVNIARSIIRGPDRNSVRIFPPTEVTTNAVLPNVIYPKATFPIELKIDNIVSSSQQRRWRMRKLSWRIEENTKVRAYTCEKHIPKLQMVEKAYSKSSKANLPHTTGTKTSSMHHSTVLTNISLMTSPSNLESQPQNLDDGIPDSEPLNDAEHDIEETIRSGPSHAHENFIEDFVNPNQRNSTTHESDLSVQPSIQTPQPRDTDKHLYLEETRTVSYGDIKSGWKSDFSGRGKIELVANINTTNCSTGMINHINMLSSEDAPIVLDTKKGANFSCDIDDPTLGVFVSHTMIVEVVIAEELVHNLERKRAGSGTSKDLAPVQSRSSVVSNDGGKSSSSGPVQMGVPTGAARVLRMQFKLPVTERSGLGIAWDDEVPPTYEDVSTLSPPTYNDHTSSSFTITPVMSDSERPTPNVLYGRGETPVIGNFGLDLSHVNSIDAMVDNIQEFSL

SEQ ID NO: 7052 - protein, 508 aa, Candida albicans
MVVDTTYYDLLNIETSATSLEIKKAYRKAAIKLHPDKNPNDPDAAAKFQEVGEAYQVLSDETLRAKYDKYGKQESIPQEGFEDPAEFFSMIFGGEAFKDWIGELSLLSELSKSAELSGYSDNADKKKDTKTAGTGSDESKESNESKKQKLDTTENGHKSSTEPRLLANGENTPGNQLTEKELEEKKRKEELEKFEEECRVKKIETRNELSKKLINKLSLFTETDMKDDVVESFQTKIKYEAESLKMESFGLEILHTIGHIYKTKSKIFLKNQTFFGWGGFWWSMKEKGGVVKDTFKTVSAALDAQRTMEEYTQMQQDNEYHAKKEAEEEEAKKQANEEVSKLEKELEEVKKEQQQQKSQDKPAAETEGSSTGDSQLKEGQEAEGSVSKFETKEPAKHTAEELAEMEKYLMGKVLAAAWNGSKFEIQGTVRAVCDNILEDKDVSLETRVARAKALRLIGDVFVSMTRTEAEAEEARVFEELVAEASKKREKKKTPTEAEQQQERAEHAS

SEQ ID NO: 7053 - protein, 256 aa, Candida albicans
MTEVFNRGAKLFDDNNQRDYNHATDSEYKRLRSEADRLFQKRQQLSQQSQNAYKQGDGQKAHELSEESKRVLAQAEECNRKAAEYVFRENNEDSGPDEIDLHGLYVKEAEWILERRIYYAVKTNQLHLNVIVGKGLHSANGVAKIKPAVDELCDQVGLNHYIDKKNSGVLVIDLKGVNLDRLPSSWAQGTNNVAPPQQAYHGTGQPQYQQQQQHQGQQSHNQYQQQQHQGGQQDIKTGNDLVDMVLKIVCGCLKSK

SEQ ID NO: 7054 - protein, 298 aa, Candida albicans
MDLVNHLPDRLLFAVPKKGRLYEKCCNLLSGADIQFRRSNRLDIALSTNLPIALIFLPAADIPVFVGEGNCDLGITGLDQIKEAEQFDNIEDLLDLKFGSCKLQIQVPADGEYEKPEQLVGKKIVSSFTKLSTDYFKQLSDKPTNIRYVGGSVEASCALGVADAIVDLVESGETMKAAGLKAIETILETSAHLISSKKSKFPEMVNIIVQRLQGVLAAQEYVLCNYNAPKSIQAKCLTITPGRRAATVSTLDKHSDDEEDWVAISSMVNRKEIGNVMDELKKAGATDILVLEISNCRV

SEQ ID NO: 7055 - protein, 385 aa, Candida albicans
MAPVADTTKYDASQFQKAHVGKTSKGSFTVSDHNKSLALYPEFLPTWNPNQKFPSYKFEQYHDKGHAADPLLSNLFPAGGDYKVKRLSPKLGSVITGIQLSQLSDAAKNDLSRFVAERGVVVFRDQDFNQGGPQAAVEFAQYFGPLYKHATSGSPEGFPELHVCFRGASQDEIDSVFSDRTNSISWHSDCSYSLNALQLTLFSCLQLPDSGGDTLFANSVEAYNRLSPAMKERLEGLHVLHSSVEQAANNKSAGGITRREPEANIHPLVRVNPVTKQKHLYLNKEFGRRIVELKEDESDYLLSFLYDHIEKAQDLQIRVTWEENTVVLWNNSTTIHSPCVDFDEPEIRHAYRISVMGERPVGDLKYLNDENYLQEKYNELGIQKS

SEQ ID NO: 7056 - protein, 731 aa, Candida albicans
MSNNPHPQDDGSQLYDNFEISPPSIVIRKADTDQSLNKIMLNQESQDINNYYTENVKNDNNPNNSYQDYTFSGNSSNQQHQQQQQQHLYEDLPTQFHYSNNSFFEPPPAPTVELTDDPLPNFNYPPSNIYINDNASDISLNTKDLPQFTTNEFLSPTSQLSTPFSPGHYSQSSQDFLQVNHTNGSGNNNNNNNNNNLLNPRSPSQYSSHSLYSDNSSQPASPFLDAASHVSNNSFIPPVIPTALSDVGSQNLDPSHNLGLSANQHFDSVNEFLSTGEIQLGQSVSSTNLPSMEEDSIKWGGGNGQEAYTSLAMMEQRASADNSGMRLATHQFSETQIKQEDQQTNMNHQYTFSNPQMNFDFDITVTPPPQQLEVKPFGNDKDMNNSSGTTNNNNNNSQFDIVSTAATNNSNQLLTENNLSNYNQLQRTEQGNDNDSLQIHRDATGIIISINQAPEEIAAKTPSLFSNSSANSSIHNSPRSDIDNKSGQYYNNGGDGNSLVPNSQLLPSSPNSNNDNYGGGGSSNDENNLLNPEEFQSVKRGRRKSHASRTSTNPNSLSPRSRSRSRSSAKSSNDAVISDNDESDDVLQSREKMLELALPSSSSKRTQKHPSLYACHLCDKRFTRPYNLKSHIRTHTQEKPFICSKCGKSFARSHDKKRHELLHQGIKNFKCEGYLQDGTRWGCGKSFARADALRRHFQTEAGKQCVKRLLLEEQANSSGKPLATSSGVEIT

SEQ ID NO: 7057 - protein, 1235 aa, Candida albicans
MTITFIPGEVNKSNYSVAHSNWKNHHIIAYGSGNNLIITGGTVQPTNKNPNPFNVDKSLQTIYLDRDPSAIDINPENGYILVSIESKILVYKPMNEYMKIPKWQSSIEIDVNESTINCIKWASEENEIVVGTDSGLYLFYLYEEYGELKYRKRWQANQVNPVTEILVTPNSKMIMTKSGSFDRLIKVWTRISYGDENTLFEVTYLPHPQGTFVIDYHLKKQITEEDKKNEIDASMANIKNIRDYLNNATDEGEVIYSFCSDYKFRVWASCEHSGHNQINNWATLDLKEVFSKISTVIVIENYHLRETLIPALKNSDCTLFNGLDINDLDLLFVVSDTAEVKIYAITNISQCPPTKILFTPISGNYHFGKNEYPLINTQVKTEKISSSYIESEEFITTVLKPLLVKEICILNERVPFLTFLLHDRVKNTLRFNIMNIEKLARGSKLESVLINKYQGHTKSIRKLVKSNSSFSQNNVLLSISNFPQHNYIWEPMLLQTNTMSVTKRFQINVESGIVNAVIINDVEPPVDWKRRHIVVTTGRNNEISVWDCNGSTNDDQPADLITKVKTGVEKDPLVFVLTEYPDNTQAERKYCVVALYAHDQIKSWKLSLHYKQNKITDILFDEESVASLPQEEEIYQATAVDAFVSEANKSLIAVISKNGLLKSYSLNFDESIRWKKVSELETNVSAASKIHGSTVINKFAVVDSTGYKLSIWDVMQGVLEYEETFPESNGPVTDLDWTFLSASKMKSTSNALLSVGFSRFVLLYTQLRYDYTNKIPAYATLKKIDISDFTSHEIGDSIWLDGGYLIIGAGNQFFIDDRWVKLGSSAIDSTIRQLMSGYTDDDEEMVFDISYLVRVLNGPLPIFHPQFVIQALFIMQFTAVKKILVQLFQVIRRGDVITWDLNTDVENLFRNDEIYQPKRRMSLTLDTFTEFNDEVADLLIERLMKISLPLLTRHQQSTLISTIVIVKDFTKDMLVELDPNGIRYLISLKLSSTATATSTSSATTKKRLAQIQWAMMCKTPDILLEHVTKHYGGKIKWKEMKDSGMPFWVEKNSFTKLFEKMAALEFKDAPLGRICLYYLSLKKKDILIRLIKHKDDKEKNKIIGFMQKDFTQASNRSSALKNAYVLLGLHRYLDAAYFFLLADAPKDCCRILADKVDSDLAVAVAKVYGVEDIAENQLSISNMDYLHDPILLLNSDNFYKSELSETLIRICMIYTRMGCDYIALELLKNWKFADK

SEQ ID NO: 7058 - protein, 233 aa, Candida albicans
MFTATKTATTTTTSICRLFSTSTKTLSNVGKKPIRLYEGVNYSIESIPVEFCKKFTKRNKTFILDRQIITSGPLGKLRVEIPEFINISENNTNENDKSIIVSVKKPENKIQRSLWGTYRSILYNNIIGITEGHLSIVKFVGTGYRAILEKDPQTGEDIISLKIGLPFTPKLKIPKGLKVSSPNPARLVIEGSDKQQVKLFAAFIREHKKPEPYKGKGIFVDDEKIVLKQRKVK

SEQ ID NO: 7059 - protein, 568 aa, Candida albicans
MDSKTVGILGGGQLGRMIVEAAHRLNIKTVILDAAKSPAKQINALDDHVDGSFTNYDSIVKLAEKADVLTVEIEHVDVDALIKVQEKFPKVEIYPLPETIRLIQDKYLQKNHLIKHDVAVTESVAVETNTVDDLLHIGEKFGYPYMLKSRTLAYDGRGNFVVKDKSYCEKALEFLKDRPLYAEKWCPFTKELAVMVVRSLEGEVFAYPTVETIHENNICHLVYAPARIPDTLAKKASILAKNAVKSFLGCGIFGVEMFLLENNELLINEIAPRPHNSGHYTIDACVTSQFEAHVRAVTGLPMPKGFTEFSTSITNAIMLNVLGDKATPNKELEICRRALETPHASVYLYGKTTRPERKMGHINVVTSSMQDAESRLSYILGDTTEIPKSLATDKESPLVGIIMGSDSDLPVMAVGARILKQFGVPFELTIVSAHRTPHRMSEYAIEAPKRGLKCIIAGAGGAAHLPGMVAAMTPLPVIGVPVKGSTLDGVDSLHSIVQMPRGIPVATVAINNSTNAALLAIRILGAYDSKWLTEMNQYMLNMETEVLGKAETLEEIGYEDYLTDKLKK

SEQ ID NO: 7060 - protein, 297 aa, Candida albicans
MSQQKYALITGASSGIGYALAKEFSLRGYKVIGCSPKSVLHLQKPLEDEYGLISIACDITNLEDIKRVKELVVKETGGYLDVLYNNAGIAIGQPAIEIPEDKLNWIFQVNVIGHINMTKHFAPLVIKSKGSIIFTSSVAARVPLSWISAYSATKAAIDAYAKTLHGEMEPFGVKVHSVITGGVQTQIGGEDNNIEEMKNQFADSPYNVDGIVESGIASQKMAADLGIPPQKYAKNMVGQITKKSSKFNLYGGSNSYLLHILGLFYPFWLVEYIMQFTFKQLKPFALIRKKYAGKKNR

SEQ ID NO: 7061 - protein, 514 aa, Candida albicans
MITTTSISSVILTILKPLVFIYQFIYRVYWSGLNQRNILQLILNFCINFSPVFIWLLIFKNAGLIPHEIRPKIHVKLAYHLDQYIFETIIGGIVNILGLASSAWLLYRFVYQSKSSNNNSNRNNHHQSQISGEYPPSNTNDIYSLYKIPQNYELDIDNDSSSSNSSNNSDIELESFPKELLKPSYNQLPPINFQDNDDQIQDSQLDNNRVHYGNSENTRFAPMVFIPQLTSVEVGQMAQSINNKILNHIQPKNSNSGFNYNYSPINSWDFCPSLLLATSWFLLNFVHYLREPIRLWQDYLAWTSYVLGHITVPIITAVWLYVFHAPGSLKAYSFALGLQNICGVLTHLLFPNAAPWFIHMNGENANADYDTPGYAAGLIRVDIALGTHLTSNGFHASPIVFGALPSLHSAMAVMTFFFVGYYSRWYFIKFLAFMFVMIQWWATIYLDHHWRLDLLAGLIYACIWFTIIYKLVIKYQQERFIMARLKYQFNNGGSTMGMRVFRNTKIQWFFDPLS

SEQ ID NO: 7062 - protein, 366 aa, Candida albicans
MATFAPHISKITKSSTKFNYGRIAKTFLGVAGSAAIATYFYNNGNPFNNNNNNNNNNGGSKNAAKALFGASAGANVKIAKVPEGKSASDYQKVYNDIATKISENLEFDENAGYYGQLLRLAWHTSGTYDKSDNSGGSYGGTMIFAPEEFDPENAGLQVGREFLMEFLVKYPWISRGDLWTLGGVAAVQESGGPKIEWRPGRVDDNTASKVPPNGRLPDASKDGKYVKDLFARMGFNERETVALLGAHVLGRCHKHNSGYDGPWGPSFNQFTNVFYTTLLGDWHVKKWDGKKQYEDDETGEFMMLPTDMALKEESYFLKYVKMYADDQDLFFKDFAKAFSKLISNGIKYPADSKPILFKTLDEQDEE

SEQ ID NO: 7063 - protein, 388 aa, Candida albicans
MTDKTNFPTTVFVSGASGFIAQELIKQLIIKGYNVIGSVRSTTKGESIKSNLTSSSTTQSLNSDLFNYTIIKDISSPGAFDNVLKQYPEIEIFLHTASPFHFKAGNIEQELLIPAINGTKNALLAIKQFGHKIKHVVITSSVVAVGKFGKFPRTSTGSTSLSSSVVVADENSWNPITWEMSLKNPFYGYFGSKTFAEKEVWIFLQIENPKFNITTINPGMVLGPQAFPINNHNGGGAGAGGTNNLELNTSSQEIVRLLNLSTVDDVNKVKISTKVENTFIDVRDVAKAHIIAFEKPQLTKNKRLLLIEDIYNEQTLLNIINNNFPQLNLPKGEPITGQIDESKLNNTWNTTQTKTIFGDKYIGIEKSVIDSVNQILEAKNEGNPQCKL

SEQ ID NO: 7064 - protein, 395 aa, Candida albicans
MPESTNTIINSSVKKIKLSALCELCHGRKAVMKRPKNLMKLCKECFYNIFETEIHNTIISNDLFYRGEKIAIGASGGKDSTVLASILKTLNERYDYGLNLVLLSIDEGIKGYRDDSLATVKRNQKQYDMPLEIVSYKDLYNWSMDEIVACAGIRSSCTYCGVLRRQALDRGAEKLGIKHVVTGHNADDVAETVLMNLLRGDVARLESSTNIMTTSAGSPIKRSKPFKYTYQKEIVLYAHYKKLDYFSTECTYAPEAFRGTARELLKSLESIRPSCIMDIIYSGEHLVLAPKKQKRKTVAYKNKNKNKKKSNSEQEEQEKQEQEVNPDGSISLNQNGIKKDGNTCEKCGYLSSNKICKACMLLNGLEINRAKVTIDNNSAIDGAAKLTKKLEQLSF

SEQ ID NO: 7065 - protein, 785 aa, Candida albicans
MSNSSIVPTYNGYIHNTRDALAVIQQVLDKQLEPVSRRPHERERGVLIVSGSVFVFIEQSSGIKRWTDGISWSPSRIQGRFLVYGELDKKNLIDKDKKKKKKRKFGPDDEYDHNVNEPDYTGGYGNHLHNDNRSHLNKNSRSGPMLLATGTGSITHTVIENKPSSSASMIHSNVIPASSSFLTDYRTSLGNGPMVSAAISQNGLVKKTITLTTTTKELHMEGKAEKQTIHLISYYSKQDIDSGKLQRPSESDLKHVQISPALWTMVQENSLGGKAPIDDEECFIVDGHNQYTNVSYIQQQQQQHQLQHQPLLHHSSSVAGSTTSIVNNSLSISNGGYGNNYSKNLSRSYNKYSNSQVSQLSYMLPPQTESSSTATIASGASVSVKREDDTNNGSNAPTGNENQYVNAINHSHTSSYGGQGYATDATGIATPAYNSYSQANTSINTSSQQQQQLQQGQYGQYVQYGVAPSTISGATSTNNNSGNAPNIPQDVYYSHYTGFVQPHYPQYHIATGNASDQYNTNAANHQYHSNNTTSSANNNSSSRTTGVGSKRKPSIVSNSTSGSVSGGNGNGNNYGYNSNSSTSTNRPPAVSTNTTSTTSGGSSFSGPSSNITTNSMSNNPWFNSSTNMAVNSNYITSSGGGNSHGGIGNNEYEPMPMTNNSASIPAYYQQHVPSHVGSAQQHQSQQQVAGVGAPHIIHNHPYLHPTYGQGSNSASTGDNSTPGGSSGSGSGGSGNNGAGGSSSVAATSGVTSSNTSGNIVTNGTLVAAGTDDAVGNSSGSYYTGT

SEQ ID NO: 7066 - protein, 378 aa, Candida albicans
MLRRTISRQFQRSQSTSTKGFWSDFSKRSPSLRIQNENIRKGLFEGIDEQGPASIKNSNIREIYHSPIAIDETFSEAYKILEADASKKYGRLEKLQEEYTKIEDKSSTKANSIKREIEELQIETELRNPEVLYNIEYNSADVIDKSQPIYRKLLKEKWKEHDLLLTMQRLEQLHVIPDTLPTLVPEADVKVKFSHNVEHEFRDWIAPGSILPTFAVEKPPVVQVQEFDKVEGNERLYTVLLVNPDTPDLEKNSFSTTLHYALANVSLNNIDNTIDVSKLLNKGDKIVLKDYLPLTPEKNTPAQRACLWVFRQKNELQPTEITRENFDIRSFVESNNLSPIGAHVWRQQFDRSVNEIREKYGLDKGRVFYKERGLAPMP

SEQ ID NO: 7067 - protein, 597 aa, Candida albicans
MSKIKNNSPTIKQRPTGVTTTNSSSSIDVVTTSAPRYEDNFFNDETTHEITSETNSTSSSSTIFQYLATISKKLDSLGVETRGIERIQPYERSTNRTKQFISVMGLWLSACGGLSSMSSFYLGPLLFELGLRNTLLAGLLGEILGCFIAAYCSLMGPRSGCRQMVSGRFLFGWWFVKLVALVAIIGVMGWSVVNSVVGGQILSSVSDDKIPLWAGIVIIAAISLIVAIAGIKQLIRVEAFLSIPVNCAFLLLYIVASQKFDYLTWKDAVVATEGSEYSAAATVKGNWLSFFSLCYSITSTWGTIASDYYILFPENTPDWEIFAITFFGISIPTTFVGVAGILIGNVALTYQPWGDAYKKLGMGGLLNEAFKPWGAGGKFLLMIIFLSLISNNIINTYSAAFGVQLAGTMFAKVPRWLWAILLTAIYLICALVGRNEFSTILGNFLPMIGYWVSMYFIMLLEENTIFRTDKFKYLFTKEFPRVNKEEEQEEEDGLDSSIVHHPIDARIIGTPLRQNQHYNFSIWNDYDKLTQGLAATASFIIGATGAAVGMSQAYWIGPLARRIGGEFGGDIAMWLCMGFSGLVYPPLRYLELKKFGR

SEQ ID NO: 7068 - protein, 749 aa, Candida albicans
MYYPAICISVAISIVLVPFLIPIRLKSPVYRRIKASLIVGLIISILTAVAPETAQIGAPFHKYGKPKIAFFGCNYQIMLTTARFCSTNATFEWCYCNNFPAFATLAHCYQVGHPGELESLISMCKPFNKTITMSTVNDAEEYYKNHAKPVEEIHKLPNYSQANFPVQLNESEIFIFKQSYEQFLGNYDKSVDYGWYLVLYWVVVIAVVSIGNWIKIIFPNLTKALTDPVSNWYRKHISTPATGSRNKTNELHLTKGLEMLVPSRLETIILTGMTVICLKMLIGDFQYVEGNPIFHSKINALLRFYAVRTGLLASALMPLLILFAGRNNFLQWVTRWDYSTFIMFHRWLSRIIVILFLVHSVCYSLYLKQHSKKPEAYIYWGFTAMLAGLIILVQGLLVLRRRWYEMFLILHIILAIVFIGGAWKHVDALYCVWFYYTSAAVWAFDRIIRICRLVSFGFPKAQVYLLPDETLKVVVPKPDNWEAVPGGHAFIHFLRFDCFWQSHPFTYTTSERDITLFIKVKKGVTTSLCRYLKSNENCSASIRVAIEGSYGESTPAKHADMAVFIAGGNGIPGIFAEALDINRHQESKHTVRLIWVVREYNSLLWFYEELMSLKDTQIETTIYITRPGILVNEDDFNKRLPRMGQNMENELQPLLQKSVPAAYNSEPVNSVGGIHSQIREELFHIKIIEGRPSIEKVIATCIEDSSGSACFVTCGHPAMVDDIRAAVANNIDNKEGKRVDYYEQLQVWA

SEQ ID NO: 7069 - protein, 555 aa, Candida albicans
MFKLLIPNKYNYVIRPLVRFKSIKSPKSPKPKPTAKLSPNVFSSGKFSQLHNDTSTTNIESKITSFDQLKIFPSVREAMIKEIKSQYNLKGPRHSNIDEIDIKPTPVQIAAIRKINQTRKLKVPNKDLEGMDDAERIQFELQNANEIQKTKVFTVAAETGSGKTWSYLAPLLSKLKSDDMEFWKSDPEGYDNTRKKGQFVKSVILLPTNELVDQVYETLQRANSFELEHKGAPGNFTSFLELPENKTMNITTMKLGQGEAPVRLFRQLETKGPIDVLITTPGKIVAFSKLVNINRPFRVFANVKYCVLDEADTLFDDSFEKNTTDVITHFPKLLDLILVSATIPKVFEKKLSKLFPDQRSLIRVATPSLHKVPRNIKVMTIDADVAPYNGSKPRCLAQALYAISKDGTEPGYVKRIIVFVNEKSEVDGIVESMITKYKVRPEDIVGVSGSVNIRDRKDMLQPFLQPAELIENDDFGSKVKILVTTDLLARGLNFQGVKNVILLGLPRNSVDLVHRLGRTGRMNQNGRVFVIVDKKSKKSWVKGLGNAIIRGLRIG

SEQ ID NO: 7070 - protein, 419 aa, Candida albicans
MPVAKDKYNLRPFKEAPLSTSPIKPIELEAVDLSLYKDGAGNLPIRQKLATQIEKSLSTYGFIMVTNHGFPHDKLEFLKSLAQGILEVPLESQKPYLAGALKSDLEDRSISLGAERGAGYKPKKYWSMRNGVEDSIIHYNFNNMQHPSFFQGSGNANNNNQYPPIVQDHLSQVAEYYRYLHNDVLRKLCNLTDIVLELPEGFIWDNYYKVTPNDYENSGGGAGRFMLYEGMDPQDREKVGDTWLRGHSDSGGFTFITSQPILSLQIRDYFTGEWNYVGHTPDGLIVNIGDAMEFITGGYFKSSIHRVVGPPDDQKEFRRLVLIYFCKPKSTCILDPEPLQSPKLNRLGIGKPKEWEKIDFAAWNNEKSRLFGKKNVNDTQSEEPKLVLLYGRLHERWHQAETDFSLEEAEKKFQVIKLT

SEQ ID NO: 7071 - protein, 589 aa, Candida albicans
MTIQSSISSSNQSITPKTKLTNLELELELELEEEEGEEQPQEVQEINSTSFSSSITFGLYDESDGDKAYLAKSKLIAESIQSIGFGKYQIGLFFVAGFGWLSDNAWPVATSLILPRLNEINGVHPPPPSSSSSSSSSPNKGPYLMLAQNLGLLLGAAFWSISSDIIGRKWAFNLTFLITGIWAIIGGSSPNFIALCCFEAFWSFGVGGNLSVDSAIFLEALPSSYQWLLTVMSAWWAIGQIVVNLISWGLIANFSCPTIDNDVGSGSGSGNIICYKEDNKGWRYFLFTMGGLTLLMFFARFAFQIFESPRYYLARGDSIKTIETLEKIAKINGKTCPITIKDLQDIDELYDESELEKETETETDTTTTTTKKNNRLIKEKLKKYNLSHVRQCFTTSKKMTLSIILVVWLWGVIGLAFPLYNAFIPSYLESRGDANKPLTVHETYRNTLIISILGIPGSLIGGILVELKIGRKGTLFLSLILTGIFLFGSTTAKTSKANLAWNCMFSFMSTIMYGVLYAYTPEVFYSQIRGTAIGLAASFNRIMGVFAPIIAIYADLTTSAPIFVSGALFIFAGILSLCCPYEPRGKPSY

SEQ ID NO: 7072 - protein, 480 aa, Candida albicans
MSGNFTGTGTGGDVFKVDLNEQFDRADMVWIGTASVLVWIMIPGVGLLYSGISRKKHALSLMWAALMAACVAAFQWFWWGYSLVFAHNGSVFLGTLQNFCLKDVLGAPSIVKTVPDILFCLYQGMFAAVTAILMAGAGCERARLGPMMVFLFIWLTVVYCPIAYWTWGGNGWLVSLGALDFAGGGPVHENSGFAALAYSLWLGKRHDPVAKGKVPKYKPHSVSSIVMGTIFLWFGWYGFNGGSTGNSSMRSWYACVNTNLAAATGGLTWMLVDWFRTGGKWSTVGLCMGAIAGLVGITPAAGYVPVYTSVIFGIVPAIICNFAVDLKDLLQIDDGMDVWALHGVGGFVGNFMTGLFAADYVAMIDGTEIDGGWMNHHWKQLGYQLAGSCAVAAWSFTVTSIILLAMDRIPFLRIRLHEDEEMLGTDLAQIGEYAYYADDDPETNPYVLEPIRSTTISQPLPHIDGVADGSSNNDSGEAKN

SEQ ID NO: 7073 - protein, 544 aa, Candida albicans
MVQEELSLFRITTGYFFLLWYIIILVAAYSGFFEILFNFRNRPILHTKQQANHQNDPESDDEEIYEGVTIIRPIKGIDPELTSCLESSFCQNYPRSKLQILFCVDDPNDPSIPIIQKLIAKYPTVDAQILTSESYNSQTKTSDDHYGPNPKVNNLAKGFVHAKYDILWVMDSNVWASSNILKNSVISLNGNLNMSRKMGQSRPVKLVHHVPLALSINNTTRSDDFIGGQDLEITAMTPVPSSESLNSQLVKRKSSPKSNNSLNVHPGFTYSKFSKKLGAELDEMFLHTSHSKFYVSLNNLAVAPCVNGKSNIYRRSDLDQSVRLIPHKDSPFFKDPKVKQDAGYYTSLGVGHAIKFFARYIGEDNMIGIALWENTQGRTGLTGDVVVQPYSGSENNAVKDYIQRRVRWLRVRKYMVLLATLIEPTTESIICGIYGTYAISTVFFGTWFNKYWFVMHMLIWMLTDYVQYHTLINHTLDVKNITYLPNWLNESIPPKQRNCLQWGYIWILRELLALPIWIIAMIGHEIDWRGRPFRIKKDLTAEEM

SEQ ID NO: 7074 - protein, 967 aa, Candida albicans
MTPPKIEELPDEEPKVAKPPKKNPFALRPKKTTIQRSVDEVYPLRKGLNKPEIKSTKPIDLLFEKLENVLDLEYDQLTIDVLYQRLFNDKQEFDSFTKRYEVIEQLLDYLIDIQKLSMNSIQNDDKNLIAISLHDLKTFSKLLNVIIIHGVYPPLNILRIGIQFEKRQLKNFSNNKNLIKIDKLPQTDFAYIEKLLTLIYTKLLRVLSIKSDVASLLLKGTGYTDFLVVAITLIVIPQFNSSDIDFAKIESIASTFELYQTYSLLLTTPSPAIFKKFVMSHLGSLHYSRPNGILTLIEFVLGLRDQEEINIEKFDNVANVVLQKPANVDTKSYFMSVGNQMYDLLININRPNVTSCVAYVLEKLWQRNKLVVTDFVLQRIWNNFNPPPKDEGILVTEAQLNNNINVILSLTKKGLEPDLYQAVIQPVLLPLWGYYTFLKQNGKEGGVALNILTSYFTLMKGIDDSGLPTIAKNLLYKHGENWKYEFGDNNLTQIVTEKPEFVSQSKESKINKFLNDLDFACELFVKVLEELDDSLIQQLFVKILNNWLNNDTQILGGEERDPFLMLLDLRLLEKIGEKFRENLATNPIDMLELVQSFLSSYKPNSKENEHSAEDSDDEMDDDESEFNSDQTITVLLQLLSAIISENDIILDNKGSELLSSIKKILSTNSQFQASSLKGSADALCTRIESLLSNNNEILPANESEAQKQILQRAITNLNDPLVPIRAHGLYLLRQLIEMKSSVITLDFAINLHLVQLKDPEPFIYLNVIKGLETLIEWNEPLVLDSLCKLYLQDDVELDEKLRIGEVILRYIQRAGQTFTGNSAKLIVETTLAVIRRAGNNRKDDRLRMSSMSLLGTCCKVNPLGMIDNLNYALDASIGILELETDKDQAIMRRAAIMLIYDLILGTSETDKVEFPQQYKSKVITVLRYVAETDNDLLVREQAQKVFATVEELIELAMELYKEENQVQ

SEQ ID NO: 7075 - protein, 396 aa, Candida albicans
MSDTEEHLQQQHVDSRELKKEKKSKSKSKSKISDSDEIEIDLNAQIPLSKKQQRQLKKGKLDLEKLARKNPSPKPETSTNDNNENSEDASGVNSTTVTSKKSPFGVWIGNLSFDTTREDLIRFIVGKTTTSDPKITEEDITRVNIPKKGNQIKGFAYVDVPSSSHVETIVGLSESILNGRKLLIKDANSFEGRPEQSKSDATQSGGINSSNPPSRILFVGNLSFDTTEDLLEEHFRHCGEIVKIRMATFQDTGKCKGFAFIDFKDEEGATTALKSKLTKMLINRKLRMEYGEDRSKRRPKRANDFGDHSNNNNDSYKENNRTVNDKPEFDSSNQRFDGNDSYGERDNKKRQYRERNDGYNKTNNSNKRMKSSVALASAQRASVAIVPSAGKKIKFD

SEQ ID NO: 7076 - protein, 435 aa, Candida albicans
MLSTHHCIIPRLAKSSICTKRQLSFFWKMLAMDDSKNKVIERPLYTWDESPYEDIRERAAMIRAQALCPVTSKPVNFVCPYSGIPTHHSKEAWEQDKQYHESKVYEKLKKVNLYEHDLRSGRKFAEFAFPKKQERDFMVNISDWDSFFYTRDFPPMNDEFNLAAATKVLTYPITIASILHKFSPLQLEPKGPLTLEGAKSLGALRYTLYPPQLGKSSTNAASTNSDDNAAEIAFKERPMRIFLIGPRMEGMLPGYIWKQFGYLFPNTEFEIHLIGPEAYYDKKLQKFTPVSDSNGRPLVQRFDEQITLHYHSKFFNELYDMGDLFPFDPYLDIFFCFHPNFQSADQIHWDKSLKGLLESKCPVFISGYHEQELTKDIEWLKNHELYPEMDIILNDTPNKFACTKYDIRVTDPTNPLNLNSRLFGFRGKRYHAIQT

SEQ ID NO: 7077 - protein, 377 aa, Candida albicans
MINVFKPIVQRDLVPTAYYNNEILQYNGVSPKDTPILPFNQTIEDLNRDIYAKPLHSHNDYWREYPLFSALSAGAISVESDIWYFPQSYKLTRTVTPSTSKYNNNNKQGNSSVNETLIFKNDEIYVGHSQEFLKPINTLFNLYLNPLSQFLQFVNPTYEIIDGDSNSENSRLEQDFFAQSQSERNSVFYNNPGQPLYLWFDFKTEANSTYDALKPLLKPFIDNGYLAYYNTTDDKYYSGPLILTITGNLPVEKVTNETIRYLFLDGPLDKFTIDNNNTNKDELKKWSKLSRVASGSLETILGSESYATSTKNDFNEEQKSQLKQVLDLAHEYGLKTRIWGDITWPWNVLDSHLKILFELGSDLLNVDDLERASQLFS

SEQ ID NO: 7078 - protein, 469 aa, Candida albicans
MRFPNVGLAELSKSIIKIRGPDATKFLNGLVTSRLLPNVVKKKQHTISESENRHSNFSEIIDVSKNYGLMHEDIYDPDYNINISRDGINSMILNSKGRVVTDCFLYPDPFHNVDGVLQESMNEPGYLLEVDTSISQQLMMILKLHKLSAKVDIVPDKKLYSYYYYDDTATFDAWLENIQFKYFKSLDPTTALQNANSFIKDNVFFNQQIAKNILGFAVDNRIPNFGIKFISNKPISTNNDKDGQQDVIPVESLFSESFSQEFDTPTINESGVVQRRFQNGLFEIQDASKGSSLLPFECNLDYTNGLSLDKGCYVGQELTIRTFNNGVIRKRIFPVQFFQLTEYNISYLQDHPIDLNMSDPVVENLSNIPNSSLGKLEITPFDDSEPQQQQPPTNESPFASSPFGSSKVVRKRKTSLGKIVSVKDNLGLVMFAVSDVEKCQIYKLELPSFEGGTQFIGVKVGIPDWWPVN

SEQ ID NO: 7079 - protein, 198 aa, Candida albicans
MAQGKVAIIIYSLYHHVYDLALAEKAGIEAAGGVADIYQVAETLSDDVLAKMHAPAKPDIPIATHETLTQYDAFLFGIPTRFGNFPAQIKAFWDRTGGLWAKNALRGKYAGVFVSTGTPGGGQETTIINSLSTLAHHGIIYVPFGYGYPGMTDLEEVHGGSPWGAGTFASGNGSRKVTDLEKAIAKQQGEDFFKTVFK

SEQ ID NO: 7080 - protein, 552 aa, Candida albicans
MSTITLTRESHKNPSKFRINHQDELDILGPNRKDRYAINDKLPTITTSSKLAIIGAGFGGMAGAIKTMEKYDEHDIQIFERHDNFGGTWYANTYPGCASDIPALWYSFSFALTSNWSRIQPPQYEMEEYILRVAEKFKLKEKTRFQTEINKVEWDDVNGEWTLYAHDVKTGQRIIHKSKLLLACQGGLVHPLHFDAKGLENFKGPYMHSALWDHSVDFRGKKVVVIGNGCSANQTVPALLNDPQYNVGSLTQISRSKHYIMRPLPKLIYTLYRLFSFNYFTMYFFRLMFIFFSELKVPLFKGEGIISNYVRKLTTEASVSYIKEVAPEKYHDKLIPDYKIGCKRLIFDYNYVPSLKDPRIDIKTERIDKVVEDGILLESGEHIEADIIVACTGYNLSKSHFNFEIVGRKGADITQLWKEEGASAYRTLLIKHCPNLWTIGGTNSITGHASVVMGIENGVDYFLKTAKPVFQGKAKSVQVKDEAYDNWLTTLQKEINKSVFGTPFGGCVSWYSGAKVNSISYPWSQLHYWWKTQFPTYRDLNYEPLDENKKRR

SEQ ID NO: 7081 - protein, 630 aa, Candida albicans
MSSEDQFTSIQWDRDDGENTNNTPTDTTIKSKSSKSKKSKKSSSKKKNGNKISPSSTTETSDADDTMKEVTDQLESTQINDDNHEVDDGNKEQNVDANQIGNSDEDPTNSLLLPVNPQPKEPQEEKEDLQQQLQQPQQQLASIQQEPAPIQPPFNAVVNDESLSIQQQQQQQQPTGYVDISYYEKYSIKTTVTHPNRDLDTASKPFISYLVTTTTDNPSILKLTKEKKPKQGEEYLTFSVRRRYGDFRYLYESLSNDFPTVMIPPLPSKSNFKYLTGDTFSSEFVHKRLHSLDRFIRFILQHKILSQSSIFHLFISNSNDWATFTTSLKLKDSSSDESGIVGRVVNEDLITETVMNFLTPSKHKKETNKDILEINDKLKKLYENLIKLDKIFTKLNKKNHELGNDYDQFSNQILKLSSVQKGEDSIMTTNFKIFSDSLNYFSKSYNEMYRYIDENFLISLQDLAKFCLRFIQLIKLKNDKSTDLAVLQDFLNKELANNSGGSGSGSGSGGSGLHQPPNPVISSYQGGIVNNTTQLIKDTLSTSNTTISNTIKSDKIKNLEQEIAKETKILTDLTNKIINEEYPNWEKFNKIEIKNSMLGLCDQNIKFYNDLLEKFGEVEMKLIKRLDEDM

SEQ ID NO: 7082 - protein, 251 aa, Candida albicans
MKFSSVVLSALLANLVASAPIKTVIVTAFTTVLVDSKGNTKIQTEAATATATLSGNAAAANTDVTQEYNTPSTTFTATSYNNNNNWASAPSSVETSIVEPATSEIIEPSTTNNIQTTLSTQTTSSPSTTSATSSSSSSSSSAQPTGSEFSGEGTFYSTGLGSCGITSTDSDFIVAISHELYDSKSVGNNPNHNPLCNKKIRAFYEGKSVDVTVVDRCEGCAYNDLDFSPAAFDKLADESLGRIDITWEWLN

SEQ ID NO: 7083 - protein, 634 aa, Candida albicans
MPAKGPNIIPKQAPSPIAIAGSPPSSSASTPRSAASPPVSVNTKSSLNTNSNTIMPRQVMSIQTSKEWVLPPRPKPGRKPSVDTPASKRKAQNRAAQRAFRERRATRVQELEQKLMEVEKERDIKEMALVNTINKLKVENQFLVKNLEQLKGEMNQMKQSFSRSQQQLISKSSPAASTASAQQIKPTFSFASNSAPSSHPSPSHHNSISPTGSSYSVQQISPAPSTDSPPNSYNLSNDSYRQFHSTLTPISNNNTPDKPLSAADVANFDCGVCPKEECLCESVGLKEPTKDKTENAKKKLQDQVNSFKPMPAVSLSRKRKIKSTDEEQEIDFTKQFSVKAKPMPDLKKLKKTTFSQPQTETASTFNEDSPVDNCGFCSDDTPCVCREAAKEAAKLNEYLNNPHQSSIMEEEISEEAKTLPPLQTNNPNHNFSKSALPVMHPGPTVEIREFTNINAVPNVLPASKNENEKEESTKDTSSDGGCTGNPGTCRQCQMDPMSTLFCTTVASRSTKSDSVSSTRQSISRTNSKTSISIDSLNNPQSPIPPPLLANNKTGGSNAPTPTPAPSTPSHSSSVSSNSGIFIPCADAYKTLSRHKKFNSVDFTTLVGKLTTRGMQVEVQSVANVLRELDRRAYN

SEQ ID NO: 7084 - protein, 176 aa, Candida albicans
MSQRIGITASALTRVWHHVDVAADNRSLGRLASSIAITLMGKHKPTYTPNRDHGDYVVVTNCAHLKVTGNKLKEKTYWSHTTRPGTLRLVPMERMIDNKGYGEIIKRAVKGMIPKNKHRLVRMDRLKLFDGDDHPYKDNLIAFADENPDMRNKLAELEKNEKNRAELREKYLSHQQ

SEQ ID NO: 7085 - protein, 208 aa, Candida albicans
MKQKKRARQTKKNFQHNGLLSLLIDLDNHIYYTLGLLTMLRTYSKSLLKTSTTIKKSFSFNTATLSLPTNKKYSTSVPDANDESHTGKFINSISKPYSVTTYARPNLVLTHGKGSYIYDLEDRKYIDFTSGIAVTCLGHSYEPITQLIKDQSEKLIHCSNLYYNLPAGELSNKLIVKTKEFDGMKDASRVFLCNSGTEANEAALKFAP

SEQ ID NO: 7086 - protein, 460 aa, Candida albicans
MTSRYRVEYALKSHRRDEFIEWIKGLLATPFVLHADDSHADAQIVAENCQARYYEIFKDVESLVKQTIFLDELNELDPKKKSISRLRTLVPSLGKFFTELPLADAFLLEDERRAISKRRLVSPSFNDVRMILNTAQIMALTNIYKQTENNINGISGKNQQQQQQKLKLITFDGDVTLYEDGKSLDENSEVVQRLVKLLSLGLYVGVVTAAGYPRQSGAEKYYERLKGLIDHLNSNHCTLKTYQKENLLVMGAESNYLFRYNNEMKGLKFIDDEEWFLPQVKNWNIGKINYIMDTLYKHLIYLRNNFNLEDSTTIIKKERSVGIIPNSGCRILREQLEEMVLSCSRKLNTILTSSSNFADSTEALCVDDIKVCAFNGGSDVWVDIGDKALGVESLQKYICHDETVDHVCPIGKSESLHIGDQFASLGANDFKARLSACTVWIASPRETVAILDDLIDFIEG

SEQ ID NO: 7087 - protein, 583 aa, Candida albicans
MLSFKSLLAAAVVASSALASASNQVALYWGQNGAGGQERLAQYCQETDVDIVLLSFLNLFPDPLNVNFANQCGNTFESGLLHCSQIGADIKTCQSLGKTVLLSLGGGVGDYGFSDVASATKFADTLWNKFGAGEDPERPFDDAVVDGFDFDIEHGGATGYPELATALRGKFAKDTSKNYFLSAAPQCPYPDASLGDLLSKVPLDFAFIQFYNNYCSINGQFNYDTWSKFADSAPNKNIKLFVGVPATSNIAGYVDTSKLSSAIEEIKCDSHFAGVSLWDASGAWLNTDEKGENFVVQVKNVLNQNACVAPSSSATTQSTTTTSSAVTQSTTTTSAAITQSATTTSAAVTTKSNQIVTSSSSSSSSIFYGNSTTESSTGIATGTVLPTGSNENAATTGSGSNTKLAISTVTDVQKTVITITSCSEHKCVATPVTTGVVVVTDIDTVYTTYCPLTNSQVYVPVQTVVCTEETCVPSPTSTAQKPKASTTIKGVEKGQTTSYPVVGTTEGVKKIVTTSAQTVGSSTKYVTIELTSTITPVTYPTSVASNGTNTTVPVFTFEGGAAVANSLNSVWFPVPFLLAAFAF

SEQ ID NO: 7088 - protein, 830 aa, Candida albicans
MDVDLDKRTKVSRACDYCKKRKFKCSGVSPCELCTKKGIQCEFNIVDRRTIRRKNKKRTIRNKPATATSSTTSKIKKDENQIDKTTLKMLTRNSKVPVQLQPLLSFPLHKLDNKQNEEEKHTQQSPPAADDTPDDERKDKDRKIDKKTHPDPPKNERAPPKVLYDSEGNLRYVGESSPLSFLFECRNIFLDRIGESDFTSESDSLEVIDEPDESTEIVQVALPSRQLLNEIVRIFYMNIQQATYFVNVEYFKENSINPVYENYSGCDPEKIALVNLVIAIGLLHAEATNDPVLSQLQSPTMRSSAYFEFGFYLTKMNMNKGKLWLTEAFSLAYCYYQAKQQRNTAWLMLGMAIRNAQALGLNRKFINESFKDRSYIVHRRRLFKTLYILDRITSILLGRPLIIDDYDWDDFDSEDVYDRDLDGNLIKDTRFECMIQACKISKLLGKVVRNYYSDGIINPYKAEKLAIELKLWSLSLPEPLQIDKIFNPSNPPSKIAEPWIDHKVTLLLLHLSQLYAIVLLSRPFFMYLIFDKKKKRKILKRPKTRPEVAMHNFCKATAKSSALIIQLVENYINTIRITSGRAESHGLTHTCFMATLIIGLSLLYLEDNGYTLKDGYSSCKQMSYLNSAKKIFEYYSQTNPISSRFYNIVEQMQLALMNKFNLDMDGNRINIKKQPQQKHENGASSTTTNETTIPTESFGVGTTDIPFNEDYDNFIDNFGNLLPTTTNQQHSTNNNMPFFMTAQPYQNTPSAYSNVSEELGNHQQQQAYPQQSSQLPDHVQQNQYLSQFSPTLDSNNLVSGHTSLGSKNQSESLDAFMYNVGLNDILYNTK

SEQ ID NO: 7089 - protein, 561 aa, Candida albicans
MSDNTTLDNISVNSEKVVDYTIHHDDRKELERLVSHNKGVEKIVSELAEGAGQLGPLEQPYDIHKVETHPDPHTDYNDADPWKYPIDKETKLRLVDWTEGDKHNPKNFGKGFKWLCTVLLGMICFVVALGSAIVTGDLERPAADFGVSEEVIILASVTMFVIGFGVGPLVFAPMSEEVGRKPIYVVTLFVAVVFIVPCGAAQNIATLLICRLIDGTAFSAPMTLIGGSLADIWEGPERGTAMAVFSAAPFLGPVCGPIFGGLLCDYAPTWRWVYWTFLIVAGFFYVVFIVVVPETHHGILLKKRAKKLRKDTGDSRYRSFNELQIRTFAQVAKTSLLRPFVLLSELIVFLVTMYMSVLYGLLYMFFFAYPIVYQEGKGWSASKTGVMFIPIGVGVIASSLAAPFFNKDYNRRAQEYRDRGELPPAELRLIPMMIGCWFVPAGLFAFAWSSYQRLSWAGPCFSGFAVGFGFLLLYNPANNYIVDSYQHYAASALAAKTFVRSIWGACVPLFTIQMYHRLGDEWATSLMAFISLACCAIPYLFYIFGARIRTFSKYAYAPNMD

SEQ ID NO: 7090 - protein, 812 aa, Candida albicans
MTKEHSIRNIFKKDKTPDNGSATATPSSSHTGLSKLFHKESKPITPPMKRTPSVSSLKRRNTNPSQTSGISLNHNHHHHQDSQNHNDATTSGGNIHSSTPVNRSRSNSDRSGHVPPTGRKVLSKAETFTHLQQLDTRNAAKNQLRNHRIPSNHLSSPLSAAPHSDKIVYNPYGLNKTATQERPKNTSFYLSGVNDGERVLSNPVASPNDYLPAELQQQHVNLLEDFEIDVGTKKLGDGGSSDVRIINSCHHKKDLYALKKFTLLSKETDEDFYKRVSEEYKIHRKAAISRHVVDAFAILRIQSQSNLTRGWGMVMEFCGGGDLFSVIVKPGWKSTPLAEKYCLFKQIAYGVKFLHDHDIVHRDLKPENVLLDANGLAKLCDFGVSEFGHEVPEDFSSPVKLSTAYVGSPPYAPPEVMLLKEKSSTEIKAFAYDPFKMDCWGLGMLLFCLVYGGVPFQQSSPNDHAFRDYKFSHKRFCTDHHTFKSNQGYPRGPGSEFKLAAKFENNGASRVAWKLCDPSENTRYTMDMLFDDPWFQSVEMCIYESPDQEVNPFVLPGTGENIDTHSVSGYSSVNNSQAPSRRGTFTSRPVGSGAGSGYNSHDESSNGLSSSFRSMLDLKDIPQKITKTDEPLPSNSSVHSNDSSSARAKSKLDHPSSPGSLLSPSTPALQSIPADRVAQTTSPINASLPAVEESDIEHESESEIQGDETESSGLQVLPPIDDVVAASPSSLTHEPQEQVLDSVESCISLPPNRDQAFAGKDGEMCSLVDLKPAALKSATDLQLGADGMCNLGYKIKKHHHTEVSNVSNSSRR

SEQ ID NO: 7091 - protein, 704 aa, Candida albicans
MSTTQDSKKTTGTYKRSRVSRGGKQQNTAFRGSGGAEPRKGYKKNSNFDENSPSITTTTTIKQQIEEIPEDEQCIICAERIKYAALTPCNHTTCHKCTFRQRSLYERNTCLICRSENDKIIITELIDKDYDEISADQITGFDEKYRIEFTQDYVQKDTLALLENTCSICRQQQTFPEFKQLIDHAKEIHGKYYCLICSKFKKAFIPELPLYSYKQLQRHQSEGDGNGNGTGTGNDTETGFKGHPECKHCHGKRFYSEDELNVHIRDRHERCHICDQSNPKTADYYKNYDTLYIHFTKAHYVCSVASCIEKRFVVFRDDLDLTAHMLKEHGGITGSNNRVIIGSNSHHHFSQLSTFNEGNSRRSNNDRWMGEDDDILQQSPEIKRKRFEERAKHYLNYNQTKVEEFQSLNNNFKNKNINAKELLSIYQRDLFIHQTQEELNILIKEFSEFFPPNSDLHKDLISVIKDNVLEVDNTSLPRESFPVLGGLKSNGNINMNSNWVNNNNNNNTTRRTNSPSTINEKFPALAKPTKKNFVNPNSQPIRYTTILKPQPKKKAILMNISQTSNSDYTPNYLNNINNRTSSSSSSSPSMPILGNGSSSGAGGGGGGGFTSSGSSSFASSRNSSSTALDDKKFPTLQKKKQIKKVIIPRVNEVKVADPNSWGKKQSQPSITPNINNDLDGIEIIDKRKQKMKRKQEKLLFSNAI

SEQ ID NO: 7092 - protein, 867 aa, Candida albicans
MIIRTLRSQLRLPKPVYISPPCRYYSTDLEKLKKESDTTESDNSASATGVIDKTHNEVLLYYDHIYPFTTSRNVVKQYLSRFSLPWSTAYDDEKLKQKVWDLSSPLETTAKITEFVPLRRDCGAFVKFKYPPEVPATKFIEEIRENVEKNEQERVNSNILTRLYHQIWRNVPKVYSVKGTPWIEDLRRFPSPKLSVKFEGDPLTEEELYVLFRRYGLINEIEPGATEAFIYFHSTRAAISAKHCITGMVLNGGKTTLHIQFVAIKRSNFLVSLISNHTKIAIPVLIALLATFAVLIFDPIREWFIEYKILHNRKSFDQFKESRWFKYLYIPYRTITGWVYSSYDYIDSQIQEVTGSSCSEEDDSSNGSNIVDGQSVRDLKNESNMFWIERYEKSKQLQLWIMENANTFIIVKGPQGSGKEEFVLEHSLGSDERLNKKVLVLECDQLGKARSDNNLINTTASQLGYFPVFTWTNTVSRFVDLGVQGLTGQKSGLSESKETQIKNMFSLATQAIRKITTNEYNKYVKSVERRNKRLKDDEKIEVLKEEQFLQQHPEAKPIIVLNKYSRRADVSSNDFIPPLVADWASGLVQNNTAHVIFLTADVGSLQLLNDALPNQVFKDISLSDASMSSSRQYVCDVLKVKDTSTLDECLEPLGGRMLDLQSFIRRIKSGESPQQAINEMISQAAELINTFFLNSHHKFGAGDSNWDPSQVWLIMKLLSECDTINYSELVKSPLFKVSKETLEILTTLEKYDLISLKRDKGVLDKISTGRPLFKAAFANIISDLRIWKLYETEYIGRLISLEAAKIQKLEEELEKIYKIGKVDGRIDYVSQKIEASNKKILDLEKQAADVASYTGKPDGKSFLGIKF

SEQ ID NO: 7093 - protein, 424 aa, Candida albicans
MAGTSFEEYFSIQTFLIVFRETLESAIIISVLLSFVHQTFNGNTKKSNRDTRNQTYNSTESSSSLIPTESDDLTFEKNDAKLCRYLQLQIWIGGLLGLLVCLIIGAIILGIFYIIGNDLWTVAEHYWEGTFSIIASIIISVMGIKILRVNKMQEQWKLKLGKILQSSGYLNNSNNQQSFNKAGRTWATRIELWSEKYNMFILPFVTTLREGLEAIAVIGGIGINENTSVMALVNAAVLAIMSGILVGAILYRYGNTLSLKMFLITSTCFLYLVAAGLFSKGVWNFELQRFIDKCGGLDVSETGHGPGSYDIAISVWHVNCCNGEMQEDGVFWMVFTAILGWTNSATIGSVVSYNVYWIVIILVFWSLIYEEKNGFLPLIPISWQLKRIQKRKNLYQPLDAPEIGVHEEVRESMDSLNSETPLQR

SEQ ID NO: 7094 - protein, 673 aa, Candida albicans
MSEEISLSLEETNKLRIKAGLSPIPTTSSQSNEKVREVISLSIEETNKLRQKIGLPLLPTTTTTNISSDSTEYKNYEDYERERLQNLKNNQLIERINNAKFNSNKRKFLTNETIIDNAEDLDTDDWLNNLGESTESSKPHKKQKTTIVKSNQNDTGPTTTIIGHTTKELQSLGNNEILTLKDTDLINDDDEDGTGSILMNQDLSNKAKLKRNLAERKEAENIKFNGRHYRRNNKEEEEEEEEEFNDIDGLLTNNKVIMSGSTIDLSSNTAKLPPPPNDKKKNMLAITNLFEDLDNDTLSNNNNIKSNVPIKMKKIKTKKDNNKKKSNKLKLLDDTIKPVELSVETNIGNDDDIDDIENQLSNSISNLRTKKLQTRLEFTPEQLAEEISANKRWEFERKLEQENLKNNNNNNNVYNDTIGFLNNLETNILSESGEVEVTANINEESADDDDEDDVKQQEVESKQTNPGVYSIVEEKQKEDEAPKFSGGLAETLKFLKSRNILDPESITTTNEELRQQELAREEAIKKSELLKMKISIEERILKEELSKDKSYIRMPKIERSGYFEKLLDTRLKQKGIIIDNNTGTTTKKTNSGMVQNNLTSYNPKVELTDKDELGNVLNTKQAYKQLSHKYHGTGLDKNKKKQEQLKKQQQQQRGSKSTNTSTTSTTVTERVIN

SEQ ID NO: 7095 - protein, 327 aa, Candida albicans
MLSRLGFSTGIRSIYSVSDQPSFVSEPWAIYPAKHKTNGKIVSVFIFDKSKFETQVSRLHTTSSSVKNPKVVISECYELIKYEVSQLSKLKHPQLLQVYEVLEETKSKFLFVTEPVIDNLVTVNPKDLDDLSIQKGLLQISKGLQFLHSYGSIIHLNLQPSSVYINNQGDWKLGGFKFLQNLNEISPQERENFYILNNMSVVPFANFNLNFTAPELIIDSHTKLDFANDIWSLGQLIYYLYNHHDLLINCFDANSISDYKQEFRKFEQKFYNHKPTELKYVLKDIPDKLYPLYPQILARYPHDRITLDQFMDSEFFNEQHYKGNVVY

SEQ ID NO: 7096 - protein, 330 aa, Candida albicans
MTRQSLLTPTKTDYSDAHGNSEGAQQYKEKWIKIKHQRDENGNLKYPWDFEVVHGFFVQSDMSTDDFGFNHTFQNMGRKKSWEDIKAELIQLNNEAPDNVQYKLIFLARHGHSTQTQIVELEGLHLWHEKNCKLTGNDQFTWAPDSELTEIGLEQAKENREFWKSELLLGAPIPSKFHTSPLQRACSTLVITWHDLKPVETRPIVCEKLREKIGKNLSDKRSTRSEIHEKFGDTYGFITDGLEEEDIYFTETRETMPEQSLRLNGYLQDLFEQDCKSGKVDKKSAVDNIFISTTSHSGTIRSVINVVGHRNFTVSTGGMLPIVVKATRRN

SEQ ID NO: 7097 - protein, 392 aa, Candida albicans
MTISNSNLFKPIKVGNKTIKNRIAHLPTTRNRATDDHVPTDLMKKYYTDRAKSGSLLITEATLISLDQGVYPNVPGMWNKQQKDAWKEITDSVHSIGGTIAIQLWALGRVGNAKLLKDEGLPLTGVSPIYEHEKAEQDAIDAGNPIQELTQDQIKDIVYNQFANAVKLADEAGFDFIELHGANSYLFEQFIHPGTNKRTDKYGGSIENRARFLFEVVDHVSTIVDPAKLAIRLSPLNNFQVPFVNPEGQEDYSYIVEGLQKRADEGKGLAFIDVVEGRFTSDGGTEGCNVDFVGEIWKGPLLKGGNYTYDRKNEWKTIENDANADDRTLVGFGRYFIANPDLPARIQKGNELNDYDRSTFYNTDDYGYNTYPFYGEENKADPNIKVLGVALA

SEQ ID NO: 7098 - protein, 546 aa, Candida albicans
MKQQDDLEKYQDIDTTNNDIKPIISFTKEDIEDGKNPKNHHVITTITSSDGKKINITNDVDQAMEAVLSNDNEPPINFDDISSTEWKKLLLKIDLYLIPIMCLLYCFQFMDKMTTSYASILGLRQELKMVGDMYSWTGTSFYLGYLVFEFPASMLLQRFPVTKTVSIFIILWGVILCLHSVPNQYGGFITLRTLLGMLESAVTPAFTIITSQWYKKEEQFLRTAFWFGSNGMGNIIGSAIAYGLYQNQINYSIDAWKLIFIVTGCLTIFVGMIIMVHIPDTPTKAWFLNDKEKRMVVERIRTNQQGFGNTHFKKHQFIEAVMDHRTWLFIIYSISSNLPNGGLTSFSAILLNGDFGYNLTESLLMQMPPGAIAVVGCIILAYCGKFTSSRLIMGMISQIVVIICNCLFTFAKNDKARLAGLYISAVGPVGFICCISCVSSNVAGHTKKITANAMFLIAYCVGNLVGPQTFIESQAPNYVGAKIAIVICSCVSFITLVLIYLSYYWDNKSRDNKARNSEDADLMNHIENYEFADLTDKENLNFRYSL

SEQ ID NO: 7099 - protein, 851 aa, Candida albicans
MAQVIWNSDIDVYNKDVIPINIAKNIAKYLPIQDLLSFSQVSKNCHLAVTDPKLWVSMLKGMGVWQEAKQLTKQDIKSNQKSNTPGGYLNDPLTCMDYIYRSNKNAKYQVIKIYKCLHEFYNDLLIQQNYNRLKIFKRFQTPQDQVKILKNLRKFNKIDYIESSRIIANEKIIQLFELLENALLRELEIHFDIEDYEKTKQFVNILIDLNNNNNNNQQILIDFFLQKSIFDENIELFNLENYDETKYFITKEGTESEGTEPEKSINNENIDELIINIAKVFNQQSHIIDLIFPQSIPMMYKVSEELISNQLSELLMLLIESSKKFGLYSVLVPMIYEKLAMSLFIDNLNPCENVGESFHQLIIELIDMSFESFAAEYMREEVGSFKSNTKRKLLDWEQVISKREQETSQKILDRVKIETKNDFLTSFKNVFTINSSKSKHNHGGTNNSQSQDNVQEEVEVEAYSEIQAKAKILSENIKSLDKIFNPELTVEILNDCRISIHRLLKFQNFSIASVRQDIFQSIQHCFVELIELINSDHLLPGFDRALTYLQTYNPKSPTYTKSHNESFDQPLILFFNLINMADIIIQMIDIFYKQEILITQQNENSILNPSLQNKKKLEAIVDKYVADGLNIGIEILVDQVETIYQQNLSDKDYYPDFNIQQQNSQQQQQQQQQTDSQTIPSSALSQTSDLSNFGPTEAAIKATEVLEQNMNLLVDSADKSIVDVFQQEIAERFFQIIVKSLKLKTISVMGATRLISDLNLYFKFINNNVKSNKRLVLPLYQALIKIGNIYLISGDDSKSIGKLVSDLSKFNGIFSQEEIYEFVQRRQDWPIIKKHVEKVMYGFGFGDCTIM

SEQ ID NO: 7100 - protein, 580 aa, Candida albicans
MSKLKTLNRQFISNLETHKVTTDAKRNLILSILKSTTTKREAKNYLTKYQNQFDFNDDLDFNKSIKIKNEQSSLTNRDSQRELFINRFLNQSNPFINVYDKEDVKLQKVPLRLAIFKIKFTKITIKQWKGIAETFKRLITLGISPIIMLDYDHLPSDSYKNNELYMINQGNKMLNYLGHPEEESDLKVTLLRSLFTSHKGVPTLDSLESILIPLYQGIIPIIQPIVYNADLSKQEFLASDKLLLGLSSALIEKRTNDLLSIEKIVMIDPIGGIPSIERHQTSHVFINLSQEYSDILSELFIGHIEPKYRDTHVDNLNTMNNVLSYINEKSGNDETTGIITTPEIMSINIDQLNPIIYNVLTDRAIISSSLPSTTNRTPHLSTTIIKKGVEVQIFDVDNYDKDLTMQNLFDDKLVNKEKLIELLNDSFGKSLDVCPYLDRINKNIATVVIVGDYDGAAIITWEYSKGEKIAYLDKFAIAKKNQGLPGLADVIFKIILQSHPFELIWRSRKNNPVNKWYFERCCGCMSAPDSQWKIFYTGEVFDKKIDRFKRKPRHQNGVVDIDRKLQQYSEICEGITPSFK

SEQ ID NO: 7101 - protein, 439 aa, Candida albicans
MSFSFGFTKDDFSDFSDDDDDDELEESNTYIKSNQSFLNGSNSIIQPLNALDSLIITPENKPKLHNLDSILSTLQGIRISFDNYTTPQGNIIYRRELFDVKHQLMIEEEQEEEEEEGNNIGVHKLLIDENQNNNDLQKNVYEGGFKSWECSYDTVDALNKLINGSDSDSDNNNNSLLSSKSILELGCGTALPSCFLLLKKFQSIKESNQLQSSSDSGLRLILSDFNYDVLRLVTVPNLLIHWASTISIEQLHELTSTTNDDGGGGDKIESRFVNDEILITTKLIDQFKNDLNNYNIELQFISGSWGNEFINLPAIKDKDTNGIDIDVIISSETIYSLDTLPIVAESIKTIFQQSSSKSIATSKNNNNNNNNKLAIIAAKNIYFGVGGSLIEFLNYFNQITKNDNDDHQGQGFNVSVEEINDSQLKRSLVYIDYRGGYSS

SEQ ID NO: 7102 - protein, 209 aa, Candida albicans
MATTIDPTDYVEVENGTLAFSDPKQQAKFELGVCMAIYKWEELTTAVDNLWGGPKSAEKRDWISGIIIDLFAESKIVDIQLIEETLLYAMVDEFDTQIDNDSALEIGNLIVKLYRDAAQEKYGLIDEMYEKWQAKQNTKNFHKVHVEDDPNNPDVSSDEKEEEDDDGEEEEIQDDNMMEIDEPEQPRQQNAPIVDDDGFELVQSKGRRR

SEQ ID NO: 7103 - protein, 619 aa, Candida albicans
MRSLSIFSLVFLFFSTLITAKTHTWYYKTGWVNANPDGGFERPMIGFNDSWPLPTLRVKKGDTVNLYLINGFDDRNTSLHFHGLFQHGTNQMDGPEMVTQCPIPPGETFLYNFTVDDQVGSYWYHSHTSGQYGDGMRGVFIIEDDDFPYDYDEEVILTLGEHYHDFSDDLHKNFMSRYNPTGAEPIPSNILFNETRNNTWKVEPGKTYFVRIINIGRFVSQYVWMEDHEFTIVEVDGIYVEKNTTDLIYITVAQRYGVLITTKNSTDKNYAFMNRVDIDMLDVIPDELELNGTNYIEYNSKADKPEPYLLDSIDDYFDDFYLKPLSKEKLLDDADYTITVDVQMDNLGNGVNYAFFNNITYTTPRVPTLLSVLSAGDDASNELVYGTNTNSFVLQSGDVVDIVLNNLDTGKHPFHLHGHVFQLIERHEEIPETEDPVGYNASDHADWPEYPMLRDTVYVRPQSYIVMRFKADNPGVWLFHCHIEWHLDQGLAIQLIEDPQGIQKNTSQHITDNHKQICEKVGVSWEGNAAANSKDYLNLKGENVQHKRLPTGFTARGIVALVFSCIAGVLGLATIAYYGMNDIADVEERVARDLDVDFDEEDNEIVNEGSSSSGSNSKH

SEQ ID NO: 7104 - protein, 463 aa, Candida albicans
MLILKRLLTTSCTLLDTSPKNYYKIIAPSTFETKKCESYNEKHSSTTTEITATSTATVADTVEDELTITHKTKRKFISTYKRSTHPTSVPLSKIFSNNFPLSINESFEDYKYRNNPLKFQHDLLSILPFYPTPDLQVKTKEGRSSEVLKVEIDDKGNYINEFVIYPENYNPQVMPDDEYHHLIMVHGYGAGLGFFLKNFDEISNFQPNNTQNNKYIVHAIDLLGYGCSSRPNFYPQNLDQVENWFHDSFITWLQKRNIPSDKTIVMAHSMGAYLMATLAINRNLKFCSKLLMVSPGAIIKHQTPVQVPRYFVKLWERNISPFTIVRKLGPLGSKIVSGWSSRRFDKLTRQEKKLLHKYSYGIFQSKGSGEYMLNYLLAPGADARHPLVDRGIDRITCDVSWWYGKEDWMDKKGGQICSAIINNKGEFKSDVKIIEDSGHHIYLDNIKKFNSMVLEEMNQLINK

SEQ ID NO: 7105 - protein, 321 aa, Candida albicans
MSFNFSNFTKDLKSFGDKISTEFNKEVVPLAQRTSRLVQEKMGNIKQDDISQLPSEYIELANKCNNIEQLYKNVLKITTNYENESYDYPTNVQESFTEFGKNITTRVSNVAKATTTAEAQAALINPNTGEFKAPKTLYHALSRATDASILTSDKSQDPLIKGLDLYSSNLNKIANARLGQDQLIKSKFNKPLLTTLRSLISQSNNIQKKVEDKRIDYDLTRSNLASCTNPQKEPKLRVDMENAEDEFANTVEDAINIMQNVLENAKPLEEFLELIKAQLAYHKLATELLDGMVKDFEELIDEQHKLSGSATSGRESGDFDI

SEQ ID NO: 7106 - protein, 544 aa, Candida albicans
MSQSPTNVPRSYNSVLDLKLASPTNSASGATGGWIVQKFGGTSVGKFPENIVDNIVKVYSQTNRVAVVCSARSSQTKSEGTTSRLLRSADLAENDKDYQPLLNAIEEDHVTNAERIQSKEIKQELIKDTKQEIEHVRELLHACQIIGEISPRSLDSIMAVGEKLSCLFMTALMKDHGLNAVYINLQDVIPLSYDFQKGFDDSFYQFLSQEIGKRVLQCDKEREEEEDVIPVLTGYFGVVPGGLLNGVGRGYTDLCAALAAVALQADELQIWKEVDGIFTADPRKVPNARLLDSVTPEEAAELTYYGSEVIHPFTMEQVIRAKIPIRIKNVENPTGKGTIIYPDNIGRRGEATPPHPPAAFEQLAMSSLLQRKRSATAITAKQDIVVINIHSNKKTLSHGFLAHVFTTLDKYKLVVDLISTSEVHVSMALSIQSDQESQLKHALVDLRKMGTVDVTKKMTIVSLVGKQMVNFIGIAGNMFKVLADEKINIEMISQGANEINISAVINEKDTIRALKSIHAKLLEGGSAIGDSSAVDTRLEALKLS

SEQ ID NO: 7107 - protein, 1263 aa, Candida albicans
MSDYESGSDIDNYYEADEFDDFIEYSDNEVEQEKSKPTPGQIEVEEIEEPEEDRIRTLTTTLKPNETQAQKLLKAHISVLVSALGGPDHTSDIQPPPYKLGHDALACLKDIKRWIRAVDEKKNNYEVALACAESGLVTNDLIVIMCQWEDKMQKKEIIKNKTTTEKTMLACLELLVLLTWPVEFGKDLSESQKLLYSEIKKVHVSYKKQILMFNNGQLLKAAIRLVLPTIAKSRIDREPRDNQILKLVLYLIRNLLAIEPANLSISNKSRKGASVTASDLPLGVTQDDISINNVLSVFKKNKVLMLLLTISGSLGTEFDRDMFGEICLESIYLIIKGLSASEVLVKKNLGSTPVAAPSQNTVPDAINASQPLQPVTTTVGMQLQDLLATESKKKKIQTQNIASRHGRFGSLLSIRSADSNSFVVSGQEALINTDSSLAKLDKSKKWKDRTYFKYDSDEYVNTSTPVYLNLTGQDILYNFVEQFLSGGCFNNLIECMGSRLTSQTDLNMVDELTLASYFFTISWFLSYQRERIGLDSENKELNYGSVGAALSEVNFILIIGYFRDSFSVKKWNSLHVAMICFKELLQISNSVFGKEITNQTGEGDEISQHEIDRELAEGIIRKLFSFNDFLSIIVQIPQTAAKHSPDYLRVSVSVVHILLKAFETFANEDVHLYIQSKRKQSKRNRKRVNNLDKSTEDRLRDVIYASDEELDQSSAKEITQERKLDFKKTEARFFHQAIVSTYINYLSRYEDLSNQEIKTCLSYFHRLFVVRKDFTGLYRLDFMQLLQKLRNYLQRGSSLRLQVEEFIYYFMKKFKTAFERFPMPIEVLFPRFEDNECKVYLATGEVYEKEETTSTSRSPRLAKDLEFVRDFGLDDQIKILVSQLHVQEKQSLLKWLIQELERIINDRILNSDSIAELNASNQHRRLFINNGYLRFLLRIIGFDLPYTMEEVPELATTVDMEHLTKVTELIKKWDSSQPVIFEDDKVPSYFVRTREAGYDEDQYNENDQEYDFNDDSIAFETEANPNSNRNHVSELDHLEELERQLSSNGSRVNSKERNGTKGKARKKSKEKKRPEPKKVRGLKRRRIPKDLLDDDDSQHVVKSAEFVHDSDDESDDEKDKAFFEREEKMRNLLNDMGGIATSEQLKEIQKVWKNLETGGNNKVASTVAKAVKEVGLFVEESDNDDEVEEESRNSAPVNEEADRTIFESGEVDTQQDLSDNTSNTSDMESETETTKRSFVEDPEEISHVQPKRKRLVISDDEEE

SEQ ID NO: 7108 - protein, 705 aa, Candida albicans
MIRRNILVIQGRSFCQSSYLAESLKPKPDIENKVTTNGDSNDITKIALNTNKPGDDGSLKRDDRVKNLINRLTATGRHEAKRNPTTTNASDAYKLFQNPDKLKALKRMFAQPKVSKRRVKKHVKEKFQKKHTEKNTKTSTEPFFKDKSTDKYLTSNNIKKHNLEQFVAPKNEDIARLAHNLDRVLFSPGVHFLQDPRTRIYNFSPFLKKVIHYKDFNFKAIENYTPVSKHQQLLENSQKFEKQFYSSTSSMTSLLSKFYHFLNKYDRYNVKRFGPIPFTGMSNDLPTNLILKPQGEFMDSTTKEKKPVYSIQADNSCDLDTLLSAMGMCMETLLTNPQNEFVKYHKDSGVEFNEPLGNTYNYASYGDFLLRSQLDCYDERLPGNGTFDLKTRASSNIRYNSKSGSLEKNDYQIWRLNGTYESYEHEFRDMIRTGAMLKYLFQARIGQMDGIFIAYHSINTIFGFQYLPLEELDKLFYTRDTISEFPDVSVRNLNEHRLPDKLPSLIGETQFKFSLEIWQKLLQEHILKDLNKEFNNKPTPFRLSVKYDTLAHLLRVFVIPATDEEIDVLQSFPERFKRDFAEDENLGEVKKHARELTKFNEKCLETKEVFSYVIQMDSCMIDGKIRQYHQLPRDYFKDWQLIYNIKRTSNAPKKYVSNLLRFPDTKISQRLKKVHQLYEKIGSIRKKSWQEKDKKSQVYHPKFKF

SEQ ID NO: 7109 - protein, 629 aa, Candida albicans
MTPIQQTPSVHNTIDDSSNGFPNQISLGEYLFYRISQANPKLKSIFGIPGDFNLNLLEHVYSPIIAEREIKFINTCNELNCAYAADGYSRVIGGMSAMITTFGVGELSAINGIAGAFAEHCPVLHIVGTTSMKDRLRAPNEMINIHHLVPNHDPLKPPNHDVYKSMVENISVVQESLDYDTKKNLIKIDNVLKKIIQEARPGYLFIPCDVPDLPVPGKMLFSDPFTAATRYTNSILSKQVLNDVTNAILEKMYDAKNPSIFSDCLTTRFGFQNDLNRFIDQIPETVKLFTANLARNLDESRNNFVGVYNGNGSSDDKTKQEFESSDFILTLGFFPNEMNTGGHTSNFSMIKDVVIVHPDYIKVNHQIYHIKQNDGERLFTLGEFLCTLTEKFDPSKLSVAAAEPKKIYQYQPSQQYSPSNLDYIPQGKLIDHFNSTLKPNDLFILETSSFVFGLPDMKFPTNVQLLTSPYYGSIGYAVPATFGATLAVNDLKSDRRIIVVQGDGSAQMTVQELSSFVRYKEILPNMPHIYLINNDGYTIERKIKGPNRSYNDINGKWKWRNLLNVFGGVEGEMYDSCVLKNSSELDQFFNGDKTKPISSHKLQFYEIIAGKFDVPQRVDNMMCISKNKN

SEQ ID NO: 7110 - protein, 252 aa, Candida albicans
MYRTISRSSSGLIRQSTARLTRQLSTTRTTPSQYNSKLLLGVLGTGALAFGYFSQQSSLIQNASTAENIEKVFEEGNAVAKDAQESLDARQEKVIKENEQKTKKAEDAKTSSESKANVADKKSNSQPEGEPEGEGKQEAAFNPDTGEINWDCPCLGGMAHGPCGEEFKEAFSCFVFSETEPKGIDCIKKFENMRSCFKRYPEHYKDELYDDGEEEASTEVVEHVVLETSEPAIEQIEQGIKEDKVKPNTKSD

SEQ ID NO: 7111 - protein, 358 aa, Candida albicans
MKAAVVPISIKDNYLTEIKDIPKPEIKDDQILIKAKACAINPIDWKHIVYQMSKPGDVAGSDVSGIVEQVGANVTNFKKGDLVSSFVMGNMSPMSGAFAEYVAAFPQATIKYDHDLDNPPKAKASMIDSFEGAASITMGLTTVAQSFSHSLNIPKHKKPGDSILIWSGATATGIVAIQVAKLVYNLKVITTASPRNHEYLKELGADFTLDYKDPKIVDKLKSLGHIKFGLDTIATPQTFQKLYDATQGTPEVYLDSLLGMDGNSIKTDPARETTVHWGHTMGYLCVLKTKTLGSTTYVQSTELLNDYNKWWENVMPTIINKIKHANLKILPNGLESANEGLQMSRESKVSGEKIVFKI

SEQ ID NO: 7112 - protein, 226 aa, Candida albicans
MKVVKICGIKTVEAASVAIDNGANLLGCILVPNRARTIDLEVAKQIARMVKRDRNPPPKFAGGTSTQHFEQVAQWIIENGPFLVGVFRNQPKEEVFRIAREVGLDFIQLHGSEDKLEFLGTEFGLIPRYVVPDELDLLEEQSLSLTQCVSLPLLDSEVGGEGKLLDWTFIEKLPTKAILAGGLTPENLPTFDNILGYDVSGGVETNGVKDSLKIIKFIQKGHAQSS

SEQ ID NO: 7113 - protein, 763 aa, Candida albicans
MSDIYIIIHISTTCDDSPTFVTKDSSELIEFAWETVDSVTLETLYKGSNLVRPTNTPITPYCSKIHRITWDNVKNAGSFKDAITNFDQYVQEHIISKKKEFSIVMFDISKLRVQLVREARDKSVVLPSYLQHPRIFDLPREYLNWQSSHPETLSYPPTSLTNIITALEVEVENISEYVDLPNFSSTPSPSKASATTTTTTANVTAIDVLSSETEPNGKVIANLHAKIAKQLIKKSIPVENHPNVFTRPFDSAQDITAFTSERSKVLYLSNLPNDTTQSELESWFTQYGGRPGGFWTFKSADDNNNNNNNNSNGGKGYQNARKYGISGFVAFNTHEEAVDCLALNGRVLNDRPIEVQASSSKVFDMAMDKLLLTSFPLSKNRPRPGDWTCLSCGFSNFQRRTHCFRCSFAAVAFQDVFNSNTGNANGNGNVSGNHNHNHNSGARRGMNLQPAQANEKIGTGNISIPSYNDPIKGPTGNVTNHLNNSETNLSNNTNLNNNNHHSNNYHNNYHHHNNNNNNHGNSNGNTIHGRSHYNNSVPFRAGDWKCENCMYHNFAKNLCCLKCGVAKPAINNQQNNTIHSVNSTAAAIAAATASGQPLNLNNNAFLNLQQQQSQSQPQGQHHYNQHSRNNNASGASKFNNGYNPKNQYYNNNSKNLSNNFGLNGMHQQNQNQILMYSQQLQQQQQQQQHDLNGSSSSHQSKLQLNNTEGLYRTSGQPNLGYPSINHEVSGPATLRDVSNNSPALNSSSLNSLANHMNSLNLNQ

SEQ ID NO: 7114 - protein, 1225 aa, Candida albicans
MSSFGSSTIANGASSGNIFANQSNFGNFLGESQLNGNNQTNFKAASVFNNDNNNINTGSPEKNANTKKTQKQTNKSYQNGKSTSTTSKQISNLQVFKESDIVATGALFEQPERLGFNHRRPTEVRSIPKYFLTQPKLLYTPEFVQNPWDQENQNKLTLMEAENGGRDYQGLYEDMQKLREIERTKMEELGLVDAENVAKDLTEAISFSGSCLDMCPVFERVRRQLENNVKALEKDPISNKISRERAVKAFSRPAAGQPPPLPSDVRPPHVLSQTLNYLVDNILQQLPEAHSFIWDRTRSIRQDFTYQNNFGPEAVDCNERIVRIHLLSLHIMAGSDVEYSQQQELEQFNKALQTLMEIYQDVRNNGGKSPNEAEFRAYHLLSHVRDPDLERQIQKLPDEVYNDKLVQLALRFRKITTQNNVVERGVTNLVGALNLYTEFFRLVYSEETPFLMACLLETHFNEIRFYALKAISRSFHTKTKPYAIQRLQQVLGFDSVQKLQKFLGYYDIDIINVNGEVLVDLFNKEKLETTYKLNSFHEKAKYSPPYSTQLDDKVKGLDWKHFVNSGRPNTGVALNLQPPTVEITSKPQQSGFVNLSSFKKPETVNTFDSTSLQSQPQAQAQAQSRPQPQSHPQSFQIPNNAPHKNIFNFKSEISSAPGSIKPSNVNSISSATEPAKPVFSFPSNENTSKSNLKSNVQNQQQPVQSFNKPVPNFSLPTQSTLNKVPLTAPSSLSFGITSPQKEKEKEKVKPLEQPDTKVSIPAPVRTSLSVVPEKVKLTQSKMFPLALQQVFEQILQDTIKSELQVVLSKLLSKYHNELERKKVIHSLGSELYDAFLREVMYECVLEARAAQFYDSHLKKRKMKVIIRNSKKAVNKLREKKMKMYELKSVTFEKLKKNKRRLSISSFESNSSFSKRKRHDSFDVSVISEKQHEVHELWSPINLSEFLKNCSENLKLKIYQNNLDLKFLLIVENWRTSYAKWLNSKLGLKANMTSSVLENSISNDKINLLITSMPNKEQLNESFFANTAFILFECGLTISSVTSIQEKLQADGKILKKIISLIDKYSRYKVSIIISFWDVSGSSITSSEVADLLHLTQYSSVSNLKSLVLCDMTTKNGNINTILSQAFNKVSLEFNGELSSTGSKREYNETKLKSSQTQQHTLQKLNHSIRNHKIRNIDNSNYNSSIIEESTPSASPKRKKIDDNRANTSLSQLQDLTAEIRRKYKK

SEQ ID NO: 7115 - protein, 564 aa, Candida albicans
MSKKNDNITYDVEKISIENPLPAKEFNDFHDKLDVEKYGETKRKLNSRHVNLLMIGQSIGSALFVSIKNPLHNSGSLSFFLAFAIWACLVIYPLMQAIGEMCSYLPIKGSFFHFSARYVDPALGFASSLIYTYTALMFVCIEATACAGLISFWTDINPGVFITIALVLFFLLNLFGAQFYGEFESIFSSFKVILILGLMLFSLISMCGGNPQHNAYGFQHWKEGGLFRPYLVGGTTGKFLGTYNCLIWAGFAAGGPDVLALIAAEVKMPRKNIGIVAKRSYIRIYLFYLGGIFFLNCLIASNDPSLVKSLKSSTVSPWTLGIQNVGVRGLGSVVNGAVLTSAFSCGNAFFFLGTRSLYSASLAGYVPRFFSKCLKSGVPINCVIFTGVVSLISYLNVSQSTGVVFNWFVNLATTGLLCSYICMWLAYFKFRKAYVVQTGKQMKKGEYPYYLAPKFIHPYFTYFGFFINVVVLFFNGFWIFFPGQFSVSNLFTSYFAPVFFICLFVFWKVFKKTHWRNAMEADITTGKQYIDEEEERDIEFELNRERRKGWFFVACRKASDFCFS

SEQ ID NO: 7116 - protein, 423 aa, Candida albicans
MAPTAVTQEPEDVQETIKRLAGLKVIGHSKNSKGIITGYDPEWADKLPETTKQRYAKYGVDISKGYPYVPVNEKVPKFVDEVFAIRNEEYPYIERGKNADPEKKSLFDAAEDVIHLTPYIGTEIVGLQLSELTEQQRDELALLIAERVVVFFKDQDLSPQKQLELGHYWGQVEVHPQATRIGEEYDGISVIWQEQQRDRWGLNLTFKQSKKGNSQWHSDLVHEKQTAGITHLHLDAIPGIGGETLWSSTYGAYDKLSPALQKFLDGKTAIYRSAHQYLDRNDPLKGPKYVEREHPIVRTHPVTGWKYLFVNRSMTVRIVGLLPEESDLILNYLYSVIETNRDIQVRWSWQKELGSVKNNKKDEPKQYRGVSALWDNRISNHSVVHSEESIVGRHGTRVTSLADTGYYDPNSKSQRESLGLSLD

SEQ ID NO: 7117 - protein, 627 aa, Candida albicans
MTDAHSVSTTLDDIINELKLTYDSSVGLLDGDSIRTIPNISTLTNLNKLLKNLWNQLDEVESIDSDVLNKIRTIKESEIKSDSKTSENDKKRKNEELTPEHQDDEDEVPMSATKKRKIVAAAKEADAKEEKDLVSEADGKVEDELDEKEEKENLNSKDDPIPPVQTGNFTQDNDTRLKNPKSEYVEPQTLSASAIAELGLFSEENNGLETQGREYLKKKYGVASYPERDLQDLLPGEIPNIDFSKNKPPSNQVQFTTFQSYIESYFRPYSTEDIKFLKERNVVPPGFEKQGYDADVTPFIIPKLGKFYADLWSEEDSTLGSKLNSPAFQQPSSDSYKPKGSIEGLTDEALFTEDISCGPLSNRLLSAILSNREGGLSDEEDAPANDSKSETKDASKSSLAEEEVATQLNSEEDYKLSAEQNDFQTIEERLKRELKYIGIFMNLPTTGESKPKAKQANGRAAKKISASIIDNDEWIKNKEDDEVCAEIRKLQRELKEVTSRNRANRKKLIPLVEEHIAYQEYCAILEDLDKQVDSAYMKRLKGKGKKKRSDVVTPQQQALNSGLRALLEKRRRWIDNIGKLFPVAEKMKRVPSESILIREGVVESEQVDDDNNENTSPAVDMLTQKSL

SEQ ID NO: 7118 - protein, 513 aa, Candida albicans
MTAADTHSITSADVQEHNRHIIRPPKFTWPAIRKYAITRVTSLWVGWDELKQYSWHEVLNPFEPLVEMNLHQWNFFFLGFWAWTWDALDFFVTSLNVSNIAEDLDSTVKDVSWGITLVLMLRTVGALIFGAIGDTYGRKWPYIINLSCLMVIQIGTGFVTTFQQFLGLRALFGVAMGGLFGICAAEALGDAPKKARGVLSGIFQEGYAFGYLLAVVFRRAIADTTEKTWRSVFWFSAGPPIILIIWRFINPETDSYQRQKERFDQGAVQKNSKAAEFKSQAKKALNQYWLIIVYLIFLMAGFNFSSHGSQDLYPTMLTKQYHYGKDKSTVVNVCANLGALAGGIVIAHLSTFIGRRTAILIGNVIAGIMIYFWAFHPMWITAFFMQFGIQGSWSVVPIHLSELSPPHFRSFVSGVSYQLGNLVSSASSTIEATIEEQIHDYGKTMAIFIGAVLAYLMFVVFIGPENRGAELGVERDDEYSAYDSDREDRGDSDLEEGNITQKTLEKPEVEHKE

SEQ ID NO: 7119 - protein, 588 aa, Candida albicans
MIEEDENTSLLSRRPSHSFLDTPIGSFKGPNSLHNFASSFTRAQSFAANKIDNSIHKKRSFFVSGDGGTVEDDETFDPELLVPSYRGERLSTVMHDIQSRNQLFMNPPNQLDQSVSPNNDVFFHDDVMNALNESRSRQNSTFGNSQFKHRIYSAPSFSSFRSSISAATTPSIFQVRKIEDEDGNVVTVLAGQSTAPQTIFNSVNVLIGVGLLALPVGLMKAGWVYGIPILLVCGLTTYWTACLLSKAMDTDDTIMTYADLGYAAYGSMAKLVISVLFSIDLLGAGVSLIVLFSDSLYALLGDDQVWTRTRFKILSFIVLTPFTFVPLPILSIISLFGILSTISITILVMVCGLLKPTAPGSLLETMPTNLYPKSLPDLLLAIGILMAPFGGHAIFPNLKSDMRHPYKFTQTLRSTYSITLLTDCSMAVLGFLMFGQNCSNEVTNTLLTTAGYPKWCYPLISGLICLVPLAKTPLNAKPIISTLDVLFGVANISTNKIRETVNSLGRFVIRIGVNAVFVVLAILFPEFDKIIGMLGASICFIICIILPCLFYVRLCGSKIRGFERFMVYSAIFISCVLASAATWAVLNY

SEQ ID NO: 7120 - protein, 963 aa, Candida albicans
MSTFYAGQLLCGGFQGTTVTPQAYHLIVEHHVSAMILSRKNAFNVEQMTKLIKDLQYIAMTEGRYKYPIMFAIDEEGGMMNSLFDPDFLTQYPGAMALAATGDPQLVYEISRAIAIEIKKIGFSIILGPVLDVVTKLSHQLVGVRSFGTTIEDVVKYGRMCAQGLQDGGLFTVGKHFPGIGNATVDSLLELPMMGDSLEQLRHFNVVPFEMLINEGLLDGISAAGCGVPNISPDETHACLSPVVINQLLRQELNFDGFVISECLEMEALYHSVGLGQGVILAINAGCDLVMVCHDMELQNEAIDSIKTAVVNGNLDEETVLKSLKRINKLQTRLPSWTQLFPEGEVSAKLPPTLFRNECPVVWEQHQKLSSLAYKKSITLIRDFDGTLPIPKHLSARGSDQIDSILLLTPLLNPIYPCKQTGSSQRLFTGEEVFQKFGDFLSNHPINKTKSYNVLHTTYTANGLTPLHESLIEQSKIVIFLTSEAGRNMYQIGIVKYVSILCGVNPLTLTKGLGPVQPRKPLIIVATSSPYDFFYNKSIGSAYLCCYDYTNNALENLASLLMGDFEAQGCVPGEKKFSTKHKKSAVEGRNENNHLSAKSVHKPKRRWLVDEFSMERDWQGLTKLLKTNSDQLTNDGFYKRLEGLLSSTAKHQKHFVVRNSSLNILYGIVLTWVNESNCGHLVYILVEKSKRLQSIGKNLHLRAIRYLIKERKCNEIVLGSSFPLISLGGNNNKPFFKGVGWNTQVSTEKSVMLLQNLDSWSVPQNILQEIMIVGVRFDICSDTSKLMKMMERCLSSEAYDAREYKNVKSLYSEAQKYLKINSPYEVKIILALEPTTQNVIGSIVIFTSNSQLSKFYPFIDVFGEENDSPGNRSIIGAIAGPVIDPSYSNLTEIFKYGLICSAITFLKTSLSEDNIKSCIMTDMGTEDKAMRGVKEIGFNVWKPYHDNYGYNSVNSNVESKFGL

SEQ ID NO: 7121 - protein, 383 aa, Candida albicans
MPRRFNKKTATTFNVVHRAHDDARFYDDEASEHVLVPQSTKKKVVTTTELEKKLANTNIRDNEGLAAQYGITYDDSKYDYMQHLKPMGNPDGVFVGAKQSQPKQSIEDLFKDQLPSKETRKVARDLNQNIPDELQGFNPNLDPRLREVLEALDDEAYIEEEDEGGDEDIFNSLLQSGEVEDEEEFYEEADDYDDEWDLDNYEEEYDAKYNSDTPEGVNSNWQRDFMQFKKDNKNKHNDWDSDDEFEDEVPELPEITANKKVSNTKMRKKKGAMTDTSSFSMSSSALFRTEGLTLLDDRYEQMSKKFEHENGEQPHKPFDMKEERHDLEDMLDDFLDNYELESGGRKLAKKDSEKKKLQQAASSVSKGKAARKVNEAFSNMKIE

SEQ ID NO: 7122 - protein, 614 aa, Candida albicans
MTSLLFAFSLFLSFSVGSIFPFSISNGPAVNDTLQNAIRSQRDVSKPIPIDRVGFSGVSLSLFFESEGYSSDSLSNLNGLLKENVDGVMIDLYWNEFTSKWQLCPAPFPNNITYTTASNRIVDVSWNNKTYKCDPNLSTDNIMSILNSFIRDTNTDVEANFMHVMYNLKSIHYEKSNQTISLENIYKEKNSNLNVVGMDTLNDTVSLLSSYIFTPTLLKQYQSTSNKYTNSSSSIRYIDSLNETQAIQDFYSQSTILMPSLQTVLLTQYKRLMVHVVTNDMAESSRSYQISSSDKDTIFFNSDLPASIFHTDNASADELCYELSDAYNGTDVNIAEFNKVSLNATLRLVVDDDKTPFTTKSLSKYVRCGYCPIFNSTEYSSQKVTEGNSSIISREFASNLFWSWAPGQPSGPDNCINCTRPTTNNTSKHSDDNGEEEEEGNNIAYKCVALTEEGWEVSNCYEKYLFACQNKLSRNEWKLNNSTKRNYFDIDDDDCPEGYFFSLPRSNIEMLSLMTTVKQENVNYPIWIDLNDITVENCFVSGGPYAQCPYQETVTTDKFVRMIAPSFVVAMVVLVLIFIEKVFRKTPIQTNRKRYWKKAIHEYYAKNDYEGVPS

SEQ ID NO: 7123 - protein, 1304 aa, Candida albicans
MMDNEATIPSSLASTEAENVDTETGNSDKSLSHINRSSNFPETTSNQLQSNNPFRSSTSTVSVPSSESVPISQLRTRIANAELVNYPFKTLNRILDDLKWTIPVQEKYNFSMLNSKPIDYSEELSKVVNSSVIHFETLILNNDLEYCKSVEKVEYSNSQQVLYIMRGILSDKKHGTYHFRLAALETDSNPFVTKLIDKHQYHVIPKSSISAHDLQILLENTIDVDKIIDDAFFKSLNSPNGQILRVTLFKAEFTQEDLVPLTDEEIIRERYLEGIKRHPNLSPETIPNQLHCIKTLIKVLRGPVTLKPEDTIKTINLKNTVMDAQIDVNLLFEKLSFTLNGDEAVPPDLNNLPDLKESYIRKILELIFFAKNVMVPNNEFQTLYSFSDNMSQVFHTIVEYDKNVSVRHFSSNYSNRFPYFINLSASAYFSDELIIKCFELTVQSDSINQLYYVDSLKQIRSFRNNNGGYSVNNKLDIYFRQRNLIGYSDFLESMKILGLAVESNETETIDDDVIIAMYRSQFKNDPKNYQYYNNHLKRIAGIKNSEKLDDFIQKELLPIDLALEELSIEEITEDDVVITAYEFKLDELLQSNGFNGNANEVIFLNKALLSVAVHRRSYILLEYLETKLPDYVKIPTMNEMTTRKAFETLDIDVQASESEIISNFQNKFLKGNVDIRLLRYALKLIAESKKSEILLSFLRTGKIDTSLLPAQNWPAGLDNIGNTCYLNSLLQYYFCIKPLRELILTFNENNFSANDYPETRKIGGRKVENMELQRSNQFVYQLRRLFQEMIYSNKRCVQPSKELAYLSFLPLSQPVNFKNQKKTDYSGRTTIEENKQVQLAETKDNQSVGTESVHGELDGVLYQQSENGLSTDKDVTMTDGDDEINTEVKDIIDMDREVETGMEIETDVDESNKNYSMAVESPSSSRSMIEDEVETPDTSSSEDDVVGSSPKILPISSDQIESTIEVGRQQDVTECIENVTYQIETALPPQLIDKDGEQHDLIKQLFCGKTKQTITPLDKPDEPPRVSLERFFSLIINVSDHPKSIYDALDYYFNEDVVKLDEGLVKKSITISELPQILQFHVQRVLFDREKLMAYKSIEPIPFSDKIYLDRYLDTDDEEILYKRNQVFEWKREISKLQQYKFDLLKIDPETSVSLIDSLKITEKYLENKIISDDSLSIELSTIQTINDEIRKLTSNLEDIDNRLNELNHLISIQFQDYKSIAYNIFAVFIHRGEASYGHYWVYIKDPHNNNIFRKYNDEIVTEVPASEIFNFLETNTATPYYIVYIKEELESSYIEPLKREIKE

SEQ ID NO: 7124 - protein, 658 aa, Candida albicans
MARRQRSKQGSSSQSGVKGPNSALTEFLRNEGITDAFRQRRQREQETVNEGNENDNDANEPEQSTSAVEVTPEARRRSTRRSASAPVEDTKDTNDDDDDDDDDDEIREMRRAAKRKLRAARRGSTRQPRNRHDPDNSGGDDSSSSSSGSDNDGDPNFSEDEDDLGNLNMRKFGEQDDCVDCGQTFELTVSSRFLKEKNGYLCNSCNQLLKARERKAKMNQMNARKKRKRVAQALLNKTDVKIPKLQDVCIKKITENIEDVDVLGDIGQMNMNRISMILSKNRSLNNKTISLFLSPDLKSLQFWDCSNVDSDSLNKIASYCPHLESLTLFMCGQLHNDNLQYFATQLTKLTELSLNGPFLISDVMWQDYFEEAGNRLTKFEIRNTHRFGNDSLISLLTNAGRNLTSLKLSRLDGLNAADVYGMIPHFLSPSKLTHLEISYPEKEELISDDLIISILSITGDTLVSLNLDGCSDLTEKFLIDGVAQFCPNLTHLSIQNLDQISDDGFAQALKEYSKVNVGGLLEVYLTKCIGLGDKAIYELFKHSGHTLVELSINSLDLLTKNFLSQVFTEDSHQFKKRLLQQLEESQDEEVEYYNHIRLPLLTYLDSGFVRAVDNELLSLIGESCPQLKIIEVYGDNRCTSKARIRPGLMVIGRQSDEI

SEQ ID NO: 7125 - protein, 299 aa, Candida albicans
MPVEELEDRVIITDPNDSTNRATILKFGATVVSWKNNNQEKLWLSEGAHLDGSKAVRGGIPLVFPVFGKQKDSNHPTFKLPQHGFARNSTWEFLGQTQESPITVQFGLGPENVDPETLKLWNYDFTLILTVSLTKDKLVTSIDVENTGKEAFEFNWLFHTYYRIHDITDTLVTNLIDQQCYDQLIGESYIEKAPVISFHEEFDRIYSKVSLEKSIQVVDKGQVLFNLHRKNLPDSVVWNPWTKKAEGMADFQPKSGFHQMVCVEPGHVNSMVSLPAGGKWSGGQEITIGGEIKVQANIY

SEQ ID NO: 7126 - protein, 262 aa, Candida albicans
MFNSISRGVFASSTRFTRVARFLHQVPKLESHETWTQEGIPGFLSPKGYNLAWTDYQNYLLTNLTLLTNGTSSEYKTPYQTLLHTAKQTTQQHVFHYASMAHNNHFFFQQLDTKENASKTKPSRFLMEKLMHEDILDLDQLRNKLLTMAENTYGQGWIFLVETEDKNLKFINCHNDGTPYYYAKQQLLDLNGGIDEGNFSYLENLKSRALNNEKDYTLPILAINYWDYMYIPDYGVTGKSDYLNKLWDHINWDVVNKRLFQI

SEQ ID NO: 7127 - protein, 323 aa, Candida albicans
MQFLTSALVLLLSVGALAKNILLTNDDGWQATNIRATYYKLKEAGHNVFLVAPVSQRSGFSGKFDIPTSPTLQTNGEFNYPPAGAPSWGHEVDDNHIWYFNGTPASSAVFGINYVIPKYGDNVTIDLVVSGPNEGTNMSPGLFTISGTVGATYTSIYRGIPGVAFSGSNSNNSFFKDSLDLKDNKEPSTIYANKVVEFVNQIFKAQGNNPRALGLGVGLNVNFPKVGYENETCTNPKWVFTRLTGQYAAGANLVYNETSNSFTWGQKSWDGLTVCNNGDCSLPSENFIVEHTNCQSSVSVFSVDYDANLGLTSQVKQILNPLF

SEQ ID NO: 7128 - protein, 915 aa, Candida albicans
MESSESIQENQLNRYILEDYDRMLKSVTEIDNPQRKCHILNEVYKMKLKYFRLKQSELNDWLEAIHLMEDTHERVFSEFEFYSLISPDYTNADVTSSFLKHFQEFKDLDESGFEAKLLDAINISCHDFSRGNLIWKQLIDAAQDEYLKVNSDTNLMHLHQYYLDRLAIPHAQLEESFNEYSSFISKYYGDDYDKYMKYMKSANKIYSSTKMKQIYYEQFEISIKQSPDNPQLWIDYMESVYSHQKKKDLNPVLAIFERAISKNESWSQNWIKIWLALIYIIYGCSSDQRPEWLQFVFQKFLRTFPNSNHVYAESIRYCLTMNDNEMATEEFQSIESRLESTKKLLQWDHQQWKSVHLAFIQFNYQISKRYSMDNNKSIVESSSNSIFMRALSVIELGDPSHSVEFLAVDMLTHMGATDMAKDLIDLMLEKFNNEAEVLLFGLRYFVSYKTDFGQIRSYFKNAIHKLDSFDLPEKLCDKWLEFEQLYGDINSYMESVAKCEIALKTLSKKRTRDITVDENNQPSKKHKREPTKDIDTETKSRETCTVKVKNIAADTDEHSIRDFFKDCGEIGDISFVEAEGIRYAIFDFENEQQVFSALTKNYKSLDGNKLEVYRLQNALLFVNNYPSTFSQATVKEMFEKIGPVAKIRFPNQTSKKIKRFCYVQMISNEDAQKIIDQYHGQKYDDPNLGGEFSWEIKFSNPEEKHERSSPISARKVKVTSISFNVSKEAFEKKFTSCGEIEQVVFPKAVYEEDGKLKSNGGLAIVTYKTTEGVENALKLNDSKWMGRKLFVSKKHQHVHYTAEDFDGVKTIGLCGLDPSLNFQQVKTIFEERFGKVAKVLLFPEDKQALVEFVKPGDAGKTSMSNNFVKLGESEAKIVTKEEITMGKSAISNTTTTSSAPLTMIPTTVRRKKSKK

SEQ ID NO: 7129 - protein, 357 aa, Candida albicans
MSNNKSKTTSQLLKSKSPTPDATDRRSQKKKLVNLQDIDSILTQLETEDSQRDSKVRRVCNCMARRHPLFEFAPNCLNCGKIICTKEGLQPCSFCGSDIIPPRDRDAIVKLLEKEKEELVTKKQESYNPSSQKTKKKIVVKMNAGEKFWDAQDRAFKLAEKELQSKKSTGLVAENASGTKETKDQDLQKAKERLETLLDYQATGEERTKIIDNASDFEMPSQSLWLTPEERALNLKKQQRLMRESLVNKERKSRGEKTVEMTIKDGKVTMVEKYVTHTEGTSHEESELEKSIKEKKMQSQTSNSVWDYEMDKSKWEKPIYFASKNIPQVDKSELKITKNRVQFPKEDASEVIATVIN

SEQ ID NO: 7130 - protein, 288 aa, Candida albicans
MPLIIFTGYPCSGKTKWAKLLQKELEIKIQTAKENSEPGQNYTVTYHSDETLGINHETYQDSNKEKLARGSQISAVKRDISRTNIVILDALSYIKGFRYQLFCEAKGNVTPHCIVHVIAPIEKCIQWNDTKESGNKWDPVLMKQLQMRYEEPNSDTRWDSPLFTILSEDPQEKIPIEDIWNALVLKKAAPPNAATLVKPTSGNSFLQELDKKTQEVVTKILQQQQITPGDVVIDKNLVVAIPTGTASTAQLQRIRRSYIGLNRMRSIDVDRIVPLFVEYLNRSLNSED

SEQ ID NO: 7131 - protein, 706 aa, Candida albicans
MIKKPLATMPTLNSRRIRLVLTLGLLLLCLIKTIHLKLTSPLNQAYLEYQALQLQQLSNFNPKNNLIELFDYLNTWHINNTLKDHQHSNPKYQVDKVSTIGDSHGVYFHWDDWVDLSLGNKKLDKVRQRNSKGQDHSDDDEDEDQLEVDDNECDASLLHYANVNAHRLESLETKHIRGRCQLYCSFPIPQRIIATTDNLFIEIPVIGKKRLGIQVSTTNNDKKFTTTTKLVSTMENLQNNFRQHYHNQQNLHTSEEPQLLIRNITRLQPKIDNLSVKDFVFNIDSEIEKLQIANLTTENGLNQTDLSRLNFYQQANALVDKTDRHFKYAWVFTDIIQGYTHHIAYPFFNRYISDRERQSVLHHMIRVWFQLMETYGYTSWINYGNLLGWKFNGLNMPWDTDIDVQMPIVELDRLAMNLNQTLIIENPRFGNARYWLEISPSYIRQGNGKNHIDARFIDIHSGLYIDITGLSTEEMIPEPATTTATTTKGEVNQSNEDENDVAASSSSIAVHCKNWNWHKLNELLPLKQAFFEGSSVYIPNNVSTILLNKYGDDALSDYKFHNHIYYPDISMWINNDICQLERNTGVIGGINLGVNIKNWNPTTNTNNNNNEGEEKSPIESSCDLKYIQDEYNIIKESVMRHQYLENLNLEDKQHQHEQQQRQKEEMISRLNNLPIFRKDPWDYYYDINHNLVTNDRWYVKIEEVAV

SEQ ID NO: 7132 - protein, 1234 aa, Candida albicans
MDLLDGIEDYSASQFKPTQVNAMATTQQDNENSDSDNTSQTQPNQSILGFDFNITTISKALNSTNDNQDKGDDDGMPNLSILDKVKNRLLGGGDASDEDENTNPDDEVSDKTQKIVHPSTGSAFQLLPQLEVDETEFSNNSSTQVIPKMKPTQKIETFYDTDKTQVIPKLNDVESWFTSKDQTQEDADNVISSKPLSKEEREAKIAKLAEQKRRERLEKERQELEQDLTKGTITDEEEELNQEANDTVVSSHNKSDGLSTKELEKAQEFLNIQKRHVDIRPEFQKKVVFTKDKLLSEFSEEEDCGTNERKTTKDKPPSSPTVEEILKSSPFTSPVKDDHNDDNVLDLFKKPSENTKNPLELYAQRLKKQLFSSPQGQTDTAKNNTKHSKKLINLDSDSDIDLASSSPTKKPPIATSTSIIGSGLKFSNRAKELDNIPELSKEQRLLIKQKFSKRKFQNSKIKTNQSKNHNVSHKQDNGFMQKLREKHINQLKLNKLNNPDHLIMEELEKDEETMTSLLEREMERVRNIRKREKLQERAKLALLEGKLGIKSNNDSEKYGDEIPESDVADSEVPDSDYNMDNDDDDDDDEDDSENESPKRAEINPRSDDSYMFGGGDNADGNGEDEGVTTTLSTQPQPVFDNTSFVDKTEGLFQNLQPRTSKEDSFISTQGEESQLQIRLPSFRDLTQVPTQTQVDQFTQVDEQATQADDVATQKILAATQKIMVPTQKIKNDTQIINKPMSQRPANSSTKRDDDDVDDDDDDDIITPANVRRGRKMIRNNNMIKIEEDDEETPSKNNNDHNPKEEEEEENDSDDPEEIQRRIKEYELKIRKRELKLRKRRKEMERKGMKNIVEGEAEESEDEWKGLGGIDEEFSDVVNSDDEKMIDNNFNIDLKNDEIRSKFMEEYQIKDQKELEKLLDDIKNHRLIKRTGINSNGLDIEISDEEDQLLEAYRKQKFMEQQQRLLQNKKLFELYKNEKSKAFFNSIQDTVEVIKIDDSDDSDIEVQTNPFNKGEKKNSGSETDKDNQGEEDEEEEDSLDKEAPIKKTIKVDEAFIRKKLSFLYSTTDEDKYERLQRISRIQHGISDGEEDIDDINVLKTKSFNNLTNNRLTPPVLESSSQPSKKRGHENDTDVDEEVDEEFMPVFKKPSIVKSFKSFQEQQGISIKDGKHHFSGVTISKQYKVVAGSKASITYMSKNNNHNKNQIKNIKEEKIQKSLHSSRRENSSFFDDSGFE

SEQ ID NO: 7133 - protein, 171 aa, Candida albicans
MNKGLTITAIAAAAIAGYAVYFDYQRRNSADFRKSLKKREVKQKKLKAKKEAESKQNKLEAVKKALLEDLAQNPIPTDLTEREAFFMEQVAVGEQKAKVDAIEAAICFYKALAVYPNPTDILGIYQKTVPEEVYELVVMMIAVYPPASVSSILNKGAPTVKDLKPTEEDLD

SEQ ID NO: 7134 - protein, 364 aa, Candida albicans
MTIKQKVLFLEKPNVDDLKQFEVKFDCIYYTLSTLEQLLIDFRTSLKDIEGIYCGWNGFGVFGGFRGKLLVHAPRHLKIVATCSVGYDAFDIEGLSERNIILTNVPSPFAFEAVADLALYNAITSFRNFKLYAENLNNNQYAHSGISRTSMLHGEFDQSSGKAIVEPVVGHTYGYACCKRDNLSPRGHNAVIVGFGHIGELIGRRLACIGMNIHYVKRTRLSESQEKSLGYEVTYHESLEETKDIADLIIIACPGTPSTRHMINKQLISSMEKPFRIINIGRGFVIDEDALVGGLKSGKILFAGLDVFENEPTIHPDLLGRDDVVLTPHIGSGIAENYRFTAHESMKNIEITLRGYDEKISRVN

SEQ ID NO: 7135 - protein, 784 aa, Candida albicans
MDDNYINLNFNTLDDLNNIPGKLEELNDLQLQLKDIAESKTSGKKDSVSGSITKVNKEKLENAIQNLTLDISKFDFVGENDCLMECDDLLEKYGQLPVLLELKTLLQTRHNVSTTINRLKKLQTIDAKLDMSLSLTELKNIYEEINSLNEKDNLLEKFNSKFNNKRDELMKQFQETLKENKWLNNSSIPNQALTLISKQFNELICLQSIVSIPAYPETWWGLDLLLEPIITRFNYHFNSVNKETNKLSKPEWALDFLENFLHDNLGLLSIIVDDTFKPLNRIGTYEVITCLLVPLRSKVENMIDLINKRVTDNDDTVSLEKNGRILSHLVFELSSFDQRIKAKYKYNPFIIDFETVPENKWLGITSDILLNDSNHAAKKWLEFENRLALRRFDNEIINASDAFSIDHDYQGLNHDKEINLHILRPTYSAYGLVKLISNLNSHFQTLNIVKYQLQFVSRIQLGLIDKYYDIIKKHYKEYNNKYSFKNALNMIPGAMVDESINKNKPGNDSTINEHTKNGITLLTEIFCSAKYISDALENWSNELVFIQLWSTYTGLSAELSEDKSIFDSALKQYDDLVNKISKSYEELFKSEIKQLLKKYVNLSEWDSPSTATRSDKNSELEPSAYLTPLITLLPQYLDIISRSVSQLDYFIISDNAVSSLCQILFEYVLTNNEFNRNGIDQMLVDFEYIVKFLQYSLNLNTSDTYSEAYEYSNDTNSDYVKIVQAIDLLDSVDPDMITNFKQETSDKNTAQLNEFVTKLRLKYQHELKELTNYDIQNLLSRVMY

SEQ ID NO: 7136 - protein, 441 aa, Candida albicans
MLQPLSIKSKLGLGLLLSYTSYEVYMQVRTQYIIKARKEEYKNLENGTDIDISKFRSTSVGGMFVNPFEEYRPQTAFEFILVRIMQLFESVYGNTIELHKKLPQPHDGAVEVEDILKVFKPDLERFRKNSEVLKKCIESNNFSQLKVKPSWFNSIPLHQQLLFTWLGQSCTLFQISGVNFLTDPIISEHLITPSIGPKRLTRSPMDLDQIKFATNDSLNFVLVSHDHPDHLELDLAGKIKNTTTWIVPLGLKSKLARKGIYKVIEMDWWDTIDITNYISDNLSDKYEIECVPSMHWSGRYVIDSNQSLWCSYVIKRNGESLVYHAGDTGYSKELFDVIGKRCGPIKLALLPIGQYCPSWHQKPRHISPEEALRICSQVQASFMKGVHWGTFKLSGEPILEPKNLLTELAQKIGKAETYRVPEFGLTYLFDLQNNTETEIHV

SEQ ID NO: 7137 - protein, 2167 aa, Candida albicans
MENFDQILDRFEKSEVFNYLTSLSAKLSNENETKSIQESDYLIYLSQLNQLVEKANITLDTKKKKSTTETTNPNNESKQTRQAISFNIYRLVSKNYISVLHKIPSKIYDLGNQLVNNLVIDDKGELSPITQVSIIILIDLFENFPNSLGSLINFSITQLYKILKKYPNINSNLIFLLNSITKNATKLDIDDKMQSKLMKIVTKGIINETISYNMEIECTSNVLIKKNYVLCYKNLLLLMVSTNYEMLLAASTSSTSAGAKMKPETIMKQQHDFQMNLLTTNEKIFNYCLSNFSKEIRIAMVELLANLLINFVPTGKFNAIEYLVTLFPLPEYNQWDSNLLMKVGENGEPIVDIRKEKNTLMGHDSESIINSSLELSLFQASVTETIIFYLQLEQFQNLEFLSNNLTFILEVILAKFVELNNMENHFMNQEWNKVLKYWSTVIEYIVQETGSASHEVLCSFIYGKFVPDSNNEDISSQDQHQQQQQLVRTQSLNKQRKRESKIFSFKTKQSSKKKNVSNWEIKPYQNPYQAYFLLFIIDMLLPYGVSFESLKKDEKPTNKDIPVGEEEEELELDLPHGSSETGSSFIRGILLNLIVNNNYYIRSYATQTLLVYAKNNQAEINQLILHTFRLVDQEHKHSDKETPGGDQNINPISSVRLLGYSLALSSLIKQTDPALLQNSTIVKVLSFCTQSLKHNTQSGVKNSSCWIILSSLVTLHNFSEYVKLNSSQFLVFWKSLLTSQFMSTSISASTPEGQTKEVIFNLMLRNFSLVCLLNYLNSVELTPESLKQIQFLLTKSYNYLTYLESNIEVVGAVTLFNNTNFNELDYNVNMLSNLLYTNYAFNNKLSTDRVFISLILYSKKIIFQSFTKLATLLKNEINSNMVIFLIKVFSDAKLFSRIPSTDNEKSKSKSKTLNQVADIADNLVLNEDYNYSFGVTSKLQHESMNIDELLIKFPFQFGIEETQWLRKTFTFATTPLPKSSIESEYSLETGSWFDYFEKIAFSSVDHSINYEPGIVLTQNYSTHYKYSTNLTTSLVDLSIELFQLVFPYLSTKIQFSLLEQIRNSLTSSSIDPLRLKAIQINVSVTLHGLISNIVKKKIAVEESILLVIIDIVKKMPMEYDQLIIKINASTLGLVGQLLDKNGVSGQITTLINDIVTDSNPYKRGFSLLALSYIYSNTKLGFSDIYHISLQLLNDPNPIVYHFTIISTRQLFEFNHDNLSLIPTVLNKIFSNYLNDSFGYDLSNKVLVNLETKYNSIAEITKLLKLFVGSLGPALRDWEIDEKLKLKDMIISLSYGIGLSTLNDYVEVYKQLLLLFQELIIYDPNLMEGEITFFRDLLNLIISKNLKISLASVSPTSLTTDTIFPFNTSFDLYSGAYECYYELLKILGVDILTQDTINLLWVSMNIKPCLELKQFIKLWLESSLDKNWFAILNSLFKLSSKKLIGPFIETNYQQKLLPLSQRQKKKNAQNVDFRDEEIENIVGGDESSDMDKNEPISWEFKLFIYEMLNHLLDLASGNSQLIERLKSKIPDIVKLSFLGSTSSITEIKLKGIELLNRSLALFGELEDPLYPSVSILEQQQAQIISALIPCFSPGNDYKVIVNAINVSSKFINLPRIKFYSKQRILKTLIYLLEEISSNKFVRFGFLESMSEFGRKSIQLAILNCWAVLKIDSYEDPENIEPEFEETLTNYSALLTSLWILVLREFSTLKYSESSSRELEIYGNYWINLISILSLESERDNEFINQYLPGDAQNFFFILFSQCMESLIKNRKVPEILTSVKRLVKNPTLVTLLFNDEIFGEIVDLFDRLILIDDDTEIQCSLVEIISSLFQTFVQCHQDNLECGFDKLFELIRISMLPLFRILPFLRSDYDANNETNQLLLKHVGDAANLLILKKALESLLKMIDLLPTIVRTDLYSCLLYILSKIYESRNKLLISVVVPFLKKIVIDTKECAPELINIFYKTIRSYFEIEVENNYSIITMLILVTNGGLTLNADESQKLSNALLQLLESKDTAPTGIQCIKSLIQLSYVSKENNLVVKFLISDLIKHITRVNETNHIDLKIAIEILMLFTRLVINDEQKQVALYSIIIPVLVKSVDEVDNLYLHEKLIVLVRQSASSFKQVVNKYLDDNQKKLTEEIVTSSVAKNTVANQSVDSFDQVPEIQLKTFGV

SEQ ID NO: 7138 - protein, 449 aa, Candida albicans
MREIIHLSTGQCGNQIGAAFWETICGEHGLDNNGTYVGNNELQKSKLDVYFNEATSGKYVPRAVLVDLEPGTIDNVKTSQIGNLFRPDNFIFGQSSAGNVWAKGHYTEGAELVDSVLDVVRREAEGCDSLQGFQITHSLGGGTGSGMGTLLISKIREEFPDTMMATFSVVPSPKVSDTVIEPYNATLSVHQLVENSDETFCIDNEALYNICQNTLKLPQPSYAELNNLVSSVMSGVTTSLRYPGQLNSDLRKLAVNLVPFPRLHFFMVGYAPLTSMGSKSFRSVTVPELTQQMFDAKNMMAASDPRNGRYLTVAAFFRGKVSVKEVDDEMHKIQTRNSSYFVDWIPNNVQTAVCSVPPKDLDMSATFIGNSTSIQELFKRVGDQFSAMFRRKAFLHWYTSEGMDEMEFTEAESNMNDLVSEYQQYQEASIDEEELEYADEIPLEDAAME

SEQ ID NO: 7139 - protein, 1213 aa, Candida albicans
MSNFRDSSSPRRGYSEFDPESGEGLGRKKSLIRPERSRMDESHPRFHYTQVANQESNHIKVQPSSTGVDPRKSNELSTSRSHLSNYATPPHQEEEEDEGIPLMDIHNASPNVSSDQNNDLKGGREVYGLNDEINDYGSSPKKNQVISSSRPMNNEKPAKPKHDIYFWKVYCYAITFWAPAPLLKLFGLPTKDRQFAWREKIGLISCILYVGAFVAYLTFGFTKTVCSSQVVRTQINHVNGGYLIINGRAYDLTSSQHPKAAGIQAGSNVLYPPMNAGGKDASFLFQNVNGNCKGLIKPRDNCSIPYDGDELAWYMPCRLFNQDGSTKPNNTFAYYKGWACHTSETARDAYYKLKVNGDVYFTWDDVKNSSRNLVVYSGNVLDLDLINWIETDDVTYPELFDKLRDDETYRGLDISLVLTNSEERQAARCLTEIIKVGSIDTDTIGCIASKVVLYMSLVFILSVVVVKFIMACWFKWVTSRKQGATMYDSKAWAKRNREIEDWVDHDHGIGAEVKTVPVKARANYKAAKTNRQSVFHRAQKLSLGPNADLSQYYDNPNALSKTFKYTTMSTQAALLGRNGYGKRGNNANKSVSGGFNGRQSNLYLTDQGSSTDLLNRPVSSYNPFDSMGDDSIVINGLSPDIIHPDVVPQPPVEYQPFGYPLAHTINLVTCYSEDEEGIRITLDSIATTDYPNSHKLILVICDGIIKGSGNDETTPDIVLDMMSDLTVPRDEVEAYSYVAVAQGSKRHNMAKVYAGFYKYNDETVPPEKQQRIPMITIVKCGTPEEASAPKPGNRGKRDSQIILMSFLQKVVFDERMTSLEYEMLQSIWRITGLMAEFYEIVLMVDADTKVFPDSLTHMVAEMVKDPTIMGLCGETKISNKAQTWVTAIQVFEYYISHHQAKAFESIFGGVTCLPGCFCMYRIKAPKGSDGYWVPILANPDIVERYSDNVVDTLHRKNLLLLGEDRYLSSLMLRTFPTRKQVFVPKAACKTVVPDKFKVLLSQRRRWINSTVHNLFELVLVKDLCGTFCFSMQFVIFIELIGTLVLPAAITFTIYVIIVAIVSKPTPVMSLVLLAVIFGLPGCLIVITVSSLSYLVYFVIYLFALPIWNFVLPSYAYWKFDDFSWGETRTVAGGDKGDHSAVEGKFDSSKIAMKRWREWERERRSTENRKQQQQQQLTNNSSNNLAVPGAAWDPSNTGGNLIDDLSQGSSSGSS

SEQ ID NO: 7140 - protein, 291 aa, Candida albicans
MTSTNLEGTFPLIARGKVRDIYQVDDNTLLFVATDRISAYDVIMANGIPNKGKILTKLSEFWFAFLPIENHLIKGDIFEKYPQLEKYRDQLEGRSLLVRKLKLIPLEVIVRGYITGSGWKEYTKSKTVHGIPIGDVVESQQITPIFTPSTKAEQGEHDENITKEQADKIVGKELCDRIEKIAIDLYTKARDYAATKGIIIADTKFEFGLDGDKIVLVDEVLTPDSSRFWSAAKYKLGQSQESYDKQFLRDWLTANGVAGKDGVAMPEDIAVQTKQKYVEAYENLTGEKWQD

SEQ ID NO: 7141 - protein, 1257 aa, Candida albicans
MSSIYIGVYKALYDYAAQAEEELNIKQNDLLYLLEKSDIDDWWKVKKRVVATGEEIVDEPSGLVPSTYIEEAPVIKTATALYDYDKQTEEELSFNENDKFNVFDLNDPDWILVGDLAKEKFGFVPSNYIQLDSTAEPAQHQQQQPQQVFQPPPQQQQAIPQQQTQIPINNFPPPPTHKDRTPDFPAPPAHRDRSPEHPPPTPEKDYPRMFEQEPRSLGSRYDRQPEGREEEEDEAPPPMPSRPTGSNIVAPEPVVGRSNTYEQEENVEHSEHSYDGEFFTWYIDEVDGRKKRAIKLSIGQGLVIIKPNTTNPKKLRMRSSSSLDNQWRIKDLITFNNEKKHVFLEFKNPAASLELHAGSKDVAEAIMAILGDLKGAEAAHGLREVAKASKASANERNRKIGRLLYDFEVQGDDELDCKEGDEVYIIDQKKSKDWWMVENIATRRQGVVPSTYIEIISTSNLDKLTDGPLRRKSTKSKGRVVETKDKRSSHHRTREERDRIREKDRAQRDKAPTSQTEQDKSMPNFHRVRTWIDSSGTFKVEAEFLGCVEGKIHLHKTNGVKIAVAADKLSVEDLEYVERVTGTSLEQYKEQVMKQQAKRAKSKSKSGATATPSSTNETKYASSATAAINDIAPPKPTRPQTTTQVSNNGAPLYDWFDFFLECGVDIGNCQRYTLNFEREQMDENILEDISPSLLRTLGLREGDIIRVMKYLDAKFDRKKTPEAPQQNGGLFIDKNGNLKNNSSSTEISKVSADALPSPVKTQVTSFTPVNESTQNNNKIEDDAWAMKPAARSSEDLLKPSPQPQTPQYTGALSDLVNIKPVGTSNENKAKTEQIPVEPSAPALQPMKTSNTAATSSIPPQGPGVTPQRTGTLVPVQKTGGLVPVQRTGAGLVPVQTGGYLPAQPTGFVPITAQPTGFIPIQATGILQPQLTFGIVPLQTGTSTFNANNKTAPPRPDTAPPPITTFGQQPTFQPAFVPLQTGVITMPQTTFGGQSQQLPTQITGGAPPQTSFNQPALVPTQRTGGQITGGFVPQSNFGKQITGGFMDTNTLSFGQQITGNAQQQPPPSTSFGQQITGGLPATSFGQQITGGFPQTSFGQQMTGGAPQTSFGQHITGGNMPNTSFGQPFSQQATSNPFPQMANQFTQQQQYQQQQPVMNQFQQQPQQQQQPFYNQFQSQPNLNQMTNMFQNTSISSPATFNQQIPTTTFGQQPQFEGFGSQPLQSQPTGMGFGNAPLQSQPTGKRANLQAATPDNPFGF

SEQ ID NO: 7142 - protein, 770 aa, Candida albicans
MAPSSSSSLDLHYERPKWYRLAIYDTLLWLLSVIFDCFFREIRPRGAFKIPREGPVIFVAAPHHNQFVDPVLLMNQIKKEANRRISFLIAAKSYKLKAVGTMAKCQLSIPVVRPQDCLVKGTGKIFVDFDKDPLRVTGKDTKFTKECMVKGLIALPQSLGASEIVEIISDTELVIRKEFKSSDKVKVLLTNGTAYKRADKIDQKQVYQMVFDHLLDDGCIGIFPEGGSHDRPDLLPLKAGVAVMALGAMDKNPGCNIKIVPCGMNYFNAHKFRSRAVVEFGDPIEIPKELVKKYANPETNREAVKELLDTITTGLKAVTVTCEDYETLMLIHAVRRLYAGNFAQQLPLPLIVEMNRRLVIGYQHFKNVPKVQEIKEKVLHYNDFLKTLYLPDHDVESCNDEAHKITLIPIFFFRVFKLLILFILALPGATLFSPVFLSTKIISKKKAKEALANSVVKIQANDVVATWKILVSMGIAPIVYSFYASVGTYYCSTHDYFSHWKLFWVWIFLYSCGVLVTYSALITGEQGMDLFKSIRPLYLSITSGSSIKELKKMRHELSEEITELVNHYGPQLFPNDFNLLDLQKSLNINGDVVYADSDEEEDMKTEELRNRRIARRKAEKKKKQTQENEDTQELQSSDMKHSSSMSDGISLLNSDNSLTNLPMFSDYVLHKNAKNPDLQLDPQSHYGSRVNSNLNSGANSSVSIYDDYRFASQSEHGGTASPVRYSRLPHLPETSSSDHMELNFASKPEGQKMRLRDRIKTKLRENRKEN

SEQ ID NO: 7143 - protein, 223 aa, Candida albicans
MFRSLVRKTTPLLAFGVGIAAFPKDWRKGQFGDKKLLVINDSVLEQIRSTDRYKQLVNDPNLKHYNSSHAFPDQHHKNYVNTGLLFGPDLMEIDPIVFLDEKNGELTSFYHLGDKLISQDGQIHNGIVSTILDEGLCSAGFPLLPSKKGVTASLSIDFKNQAPPQSTVVLHAKVKEAKGRKVVIEGYLETLPLNKSETPLLIAESKCVLVEPKWFKYFAWLQV

SEQ ID NO: 7144 - protein, 660 aa, Candida albicans
MFQQLTYRLRLFRRRHKYIFINSIFLSVIIIFLIYSYWSNLPAEDNSAIINEKGTYHRSLWESITMALFPPKTKPFEEKKPQVNPNNNQEVGVESGASEISQHKQQQQQQQHAKEPTTKTSSKSLVSDEAYQLNLKLINEQQEKYNRLHPFEQKRLQQGYEFFDNIFKIFYQAKPSVSQLNTYPSKKRIYHARFDSLADDDTIFSEKYLSQFLQLSNEELAAMKKSHKYVVENLPEDAPDGLYKKNGIVYVAGGSFNWLTLLSIKSLRAVGCHLPIEVFIPKIEEYESDLCNRILPELDARCIYMKNQLMNPNKDNSDSFANKFEFKGYQYKALAILLSSFENVLLLDSDNIPAHSPEELFENDPFKSYGLVVWPDYWKRATSPYYYNIADIDVSEKYLGSKYNEVEGQYTDLSVEKGSVELDKIPLHQRLGSIPDPTSESGQLLISKKTHLKPLLLALYYNLYGPSHYYPLFSQGSDGEGDKETFLAATVTLGKRYYQVAKFLVSLGHFKVPGGDFEGCGMGQFDPQQDLEYIKLREQYAKIPEKDKEKQHKFKLQHQVLEKGPEILFVHANFPKLNPWKLKQEKKIFDAKGNRVRLYGPGMIKRIGYDFEWFQWEGMKYLLCIYDVNLQIFQDVKKSDLCDEILEHLRFLESTQNITD

SEQ ID NO: 7145 - protein, 697 aa, Candida albicans
MSHSPNLSPQISNDIIDADTTSLASTETQQNIQHSQIHPIGHHGREQSEEPQNTTKTTTTTTNKIHTTTPSVDPDLGPLRELEQDLSSLESQQEQYLSQKPTSTSIKTNKVPLRERRGLLAQIVLIPEYEDARDYPNKIKYLIVFIIAFASLAGPFGTSVMLPAIDDIVNDLNTNVSTVNVSVGIYLLSLGIFPLWWSSFSERFGRRSVYMVSFTLFVAFSIGTALSPNIAALIVLRVLQGGSSASVQAVGAGTIADLFIPQERGQAMGLYYLGPLAGPFLAPILGGAVSQAWGWRATQWLLMIISACSFVLITFFLPETLRRVDTIQVAKDLMKKSDNNGSQNEKIHDDFAGADNSSVHDIDGNPIPGTELHQVVSNLSRRSSNARSIVTYMEEQENEGPIIDPVMPSISRLTTNRSAYSQRIHQNYVTDELRKTTSNLTQSNHPQYNNNNNNDNDKWSSVKTNCYDLIIRPLHSIILLTHPPVVLVISFSAISFAAIYFFNMAISYEYARSPYNFSSVILGLMYIPNSVTYFMASIIGGKWNDRLLNRYAQKHGELVPESRLSWNIVVAIILYPMACLIFGWTIKYREFWVIPLIGTALFGFASMLVIGATVTYLVDSLPGKGATGVALNNLIRQILAAIATFIVEPLLRAIGAGVLFSIIAGILLVSSLVLLYLKKRGAFFREHYDVMDLYAKL

SEQ ID NO: 7146 - protein, 303 aa, Candida albicans
MSTDIFSICAKCLGDESRIKMIKQVNGDECRQCTRPYTIYRWGNRKQGNKTIICITCARARHCCQSCLLDITYGIPTDLRDTALEMAGLEPLTKSANPTNREVKAIMADKLETKFKEQQERSNDILSKLAEKLNKPEEKKTEVAIDVAKLAKKLPFGNSLDVQKYPDMTTFFVFGFSSDFPQAIFSRYAEQYGKVESVVFSSVSGCGFIRFEKVSSAVGFAKSIAENGLNKNKSIAGLLILENTPMRVCFGKQKPLPRTAADQRKLNTVVTKVMKQLASKSKVGVVVKTKPNVYKALSEDYEE

SEQ ID NO: 7147 - protein, 413 aa, Candida albicans
MQIKSFLLPIVAALLTSVSAADSSNKCSFSKTSITEATAITQLNACSTLDGEISISGSGIGSIDLSSVKVLKAKLSILNSPSIVSLNFNQLQNITGALVINNATQLNSIDLTQLTNVETLQLVSLPSFAILNLNQGVQKAGTIVLSDTALTNLNGLASFNTIDSININNNKNISKIEFSDLQTVTDSLILSFNNDDAEVKLDSLKWAGNLTIQDVSSIQASNLTSVNGSLLISYNTFDELEFPNLKSVGNSMQIFAHDELTKISFPKLSELDGELEMFNNTQLEEIDFGNLTTIKGAVTISGPFDNLTMENLKLVSGDFQVNSTSDKFDCSAFDKLHEKGKIEGHNYVCTHPANPSSSSKSGSSTQTGKSDSKSSDGSSSSNSSSSSKKGASNVLVVPGMVLTTALGVLLALI

SEQ ID NO: 7148 - protein, 1307 aa, Candida albicans
MDKLETFQRNDPRKLFELANQLNERSFFAIFLNETQFKIINHILSLDNFEIWTNFLEGNCYISYLQPEDKNDKPETPNTNENNESAGGERIQNNSSDRDTPTLNNNDKKNDSNKETMQAELETPETLFPEGAEMIKKLALHVRYLLWEKAIDFYYNSKVLDESNNILDEVSDDYQLIDSLDNIVDEKASNESEKKEAVEKLKVREIEDDYDDDDEDEDEDEDNNDKPNTTDLANNNSNSSESRLAYNSNEQLVLEIPLSIFKTKQQETNGTQDRISNSLSADGNSSSNNFGVIKQLEENNNEDQDKLLQEFNKVYHNFEYDRETLLKRRKLEKSDMQLESNKSNKGDNASDSKSATHIDMNLGAASTSLQHLLSTIQSKRNKVPLNDHELRTLFMDVRKNRGKWANDDRVGQEELYEACEKVVTELRGYTEHSTFFLNKVSKREAPNYGLIIKKPMDLNTVLKKLKNLAYNSKQEFVDDLMLIWSNCLTYNADPAHFIRAHAIAMQKKTIKLIPTIPDIRIRNRAEVEKEEEVENGKRDEEEDSLGGKSMKKGRKRSRQDEIKAEAEAETPNSPSPAGTPFLASEVNSVRENTPAATDNGNVSNDEEEEEEEDTDNINGTATGISGMVDGDDEEFDPELQAWRTLTAKSRANYCAQRADLFDENGHLKSDVPAICRKSNEMSNFNEYLNNKEVISKSKSLLENDEPYLLEYDVAGGIPGIAYCGVDKETEETYENKLVDIYLQQTSGDASKIKSDFVLSTNSGLNKVYFENICEIQEIRKICFKISLIRQMQTQQFVHHTQMKQPEIQTLKEIDVDAASKLPNHDASTGDVQFSVFRRNIAKIAMQTGFETTQQAAINTLTQVAERYLGNLIKSLKLHSETTSDNRLPPREILLLSLLENGVDRPDDLYTFVQERVVKQQGKLKDLRIKLSNFLKDLLRPGLENFNEKSFEDNSEQFMTGDFSNGIGDDFFGFKELGLDKEFKMLTSSIPIYLLHSRLHNQFTTGGGTAQRNKYEDLQEYEPDKIHGNEVDKQIGILISFYQTLYEKSQTFYVKAQKKKGESMELPPDNIFILTEDEDLPQKQRNVRPKLPPTGRISSIKKKIIANSFFLPEEEELQKQEMELKAKEEAEAAAAAAAAAANSTQTAETAQVMKPVDSLEMSETLNTSDIADMLREIESANAPVSREEQLPEKQFNTEEKKVGLPKTDANELKYEPVDEQSKIYATTEKNDNVKGIENKPKQEDFKQIENNQENKNLEEIEDTLEDDTEIENSDSTKLDIKENETLVYESEVDPDESSIDSLFEQNEE

SEQ ID NO: 7149 - protein, 328 aa, Candida albicans
MAKKKSRSGLLKAPKTITGKHGVPKSLKPQRAREIIRRFHVLQKSKDSVLAKLQKIIPQISKNDYHQIEEMSIYQDSFKGFVLPLKYSENPIYKIDHTLNKNDLITTLACIDAEIKQRGGIEAYQSASTQGQASKRGGDSSKKLVEWLKSDLYKSKLQNVNALEIGCLSPYNAISTSSIFDDVVRIDLNSQNSLILEQNFMDRPLPQKESEKFNLISCSLVINFVPSPKERGEMLLRITKFLKKPKHAMSALFLVLPLPCVSNSRYFDNEKLIEIMTALGFTQTFSYEGNKVVYWLFDWNGKVNLKKKIPKKELHSGSNRNNFCITLA

SEQ ID NO: 7150 - protein, 308 aa, Candida albicans
MNIVKNLFKGTTTNNLDKEIQQKGFEISQCSEICESCTSKFPKHLKFEGESEGTSLWNTTKPYGMHIIIATGKKDWSHDAINEDGKKKDTLKYKIGKWAENNTNSPLGTIKVNVSSMSSDELYINENYKLEKQGDLLILPYFLNIKGITIDEVDTYLNELESLLINSTNNNDSTIIIDEIITKLPKISPNLNQSFVFFCSHTTRDKRCGITAPIMKREIDNYLQELDLIRNFGDYRPNGIQTEFINHIGGHKYAANVIIYLKKSGKNIWLGLCKPNNIKPIVDECILGDGKVWPNKVRLLQKFDPIEW

SEQ ID NO: 7151 - protein, 379 aa, Candida albicans
MSSLSSVTRSAKLATQSLKYNTRPSLSKIGQFQTSKITYRANSTQSTPVKEITVRDALNQALSEELDRDEDVFLMGEEVAQYNGAYKVSRGLLDKFGEKRVIDTAITEMGFTGLAVGAALHGLKPVLEFMTWNFAMQGIDHILNSAAKTLYMSGGKQPCNITFRGPNGAAAGVAAQHSQCYAAWYGSIPGLKVLSPYSAEDYKGLLKAAIRDPNPVVFLENEIAYGETFKVSEEFSSPDFILPIGKAKIEKEGTDLTIVGHSRALKFAVEAAEILEKDFGIKAEVLNLRSIKPLDVPAIVDSVKKTNHLVTVENGFPGFGVGSEICAQIMESEAFDYLDAPVERVTGCEVPTPYAKELEDFAFPDTEVILRACKKVLSL

SEQ ID NO: 7152 - protein, 338 aa, Candida albicans
MSKQNIDKSTEHSAGENALSEKNHTIESNKNNIDSEEDDEEDEDYDPEKKNEAENEGGVSSDEEEDNDQYKDGKTSKIPDYSTIESSTSQVKTRSQRLHEKLSNQSRFIGNFEVDSKTGLVKDQSNIDVNSIFENLKNGSPSIDNSEELNIDSEKTANSQQQQKQQSNIEENELQGPKQIKIQINYTFAGKLITETKYVDENSQEAKAYLNSTSNISSNNSNEDIPYRRSQVKVIRTDPVTNETKELRIKLKRPSLIDRFLSINGNSKKMKLSTLEKSRLDWASFVDKRNINEELKIHNKAGYLDKQDFINRMNSKRDDLYLQAKEKEKIRKQQLLQK

SEQ ID NO: 7153 - protein, 627 aa, Candida albicans
MTKTIHIIDVESGNLQSLSNAIKRIDSNYIIKFIHNEQDFIDNDSQIEKLIFPGVGNFGHFVKQLNERKLINHLKSYIKQDRPLMGICVGLQSIFHESEESPNIKGLGLLLDNDDNDDDDEKKLKLYKFDNDDEKFKIRGIKKSVPHIGWNNIHDIIINGKQTTTKSLYGLNKIDKYYFVHSYAAIIKNNNDEIIENKFIKDLSSKGWDLAISQYGSEKFISAISKNNLFATQFHPEKSGIVGLKIIKNFLNGEKNPTPTPTPTPTPNNLAQGVDSSSTLDVETTLTGLTRRIIACLDVRTNDDGDLVVTKGDQYNVREQLSSSSTNESAEEDSSQVRNLGKPVELATKYYNQGADEITFLNITSFRNSPLKDLPMLQVLKKAAETIFVPLTVGGGIKDLYDPETGKTVPAVDVAHLYFQSGADKISIGSDAVTIAENYYANNGEITGLSSIETISSKFGNQAVVISVDPKRKYIKDPTTETTTMQTIKITDPSQYGPNGEQYCYYQVTSQGGRKIHELGALELCLACEKLGAGEILLNSIDHDGSNKGFNLQLLQQIKSQVSIPVIASSGAGNPQHFQQVFEMDCGIDAALGAGLFHRGEYTVNQVKKYLQQEAKMDVRLDEDLEL

SEQ ID NO: 7154 - protein, 302 aa, Candida albicans
MLRRTPCVIRQVIRTSIRNSSNSGSTSALAYKTLHRNQKRPPLPTLETPNWSADTAVSSILYETPVPSKAPPKQHVLNCLVQNEPGVLSGVSGTLAARGFNIDSLVVCNTEVKDLSRMTIVLKGQDGVVEQARRQIEDLVPVYAVLDYTNAEIIKRELLLARVSLLGPEYFQELIATHQLHIDDGSSIPDIDACESAYHPNNLAPSEALRQKHIHLDHISTLTKQFGGKIVDISDRNVVVELSAKPSRVSSFITLLHPFGILELARSGMMALPRTPLNSFTEVEEESIDAADIVDASQLPPG

SEQ ID NO: 7155 - protein, 838 aa, Candida albicans
MIFPILPVISSPEDKQSIDEFSLVGQVLFPIESVSPKKHFIHQFPHDLDIFVNAIDNATTDQIVELLNVGIKQVFVNEKQYHDAIEAGLPSSRFVVAVDVPSTELLTSEASFVTSKPFSESDLKKYNANENRVIYIESNFTQDGAIELAKNYVPVIPSTKLTVKREEENKISISAVFVSTLTTDRPDGLYTTLITTPSPSYTALGIVYSSKDSIIAAIEEKVGVYQSRKRRDELWYKGKTSGATQKLVKLSKDCDSHVIQFMVEPRTGYGFCHRETKFTCFGDDIADSPVRGLPKLDSTLQDRLENALEGSYTKRLFDDEKLLIAKLKEELDELIEAKSKEEIAWECADLVYFAMVWCIKHGVRLADIEKNLDVKSLKVSRRKGDAKPQYQEAPVNSSYKLEIVSVDDAAAVERAMTRPVQKTADIMKLVLPIIEKVKSDGDKALIELTSKFDGVKLDAPVLQAPFPADLMDISEEMKAAIDLSMQNIEKFHAAQLPKEKVMTVETSPGVYCSRFAKPIENVGLYVPGGTAVLPSTAMMLGVPAKVAGCKNIIVASPPSRATGKLTPEVVYVAHKLGAKCIVMAGGAQAVTAMAYGTESVLKCDKILGPGNQFVTAAKMYVQNDTQALCSIDMPAGPSEVLVIADSNADADFVASDLLSQAEHGVDSQVILIGVGLSDEKLNEFQAAVERQAKVLPRKDIVAKCLAHSYILLAKTYKEAFDLSNQYAPEHLILQIDDAPSYVPDSIENAGSVFVGALSPESCGDYSSGTNHTLPTYGYARQYSGVNTATFQKFITSQEVTEKGLQNIGKAVMELARVEGLEAHRRAVEIRMERMAETK

SEQ ID NO: 7156 - protein, 293 aa, Candida albicans
MWKKKKREFFFCHSFFFFFYLAHFFLQLDMSWGGFKKAINRAGASVIVKDVDKTMDKDFDVEERRYKTLKTAGTNLQKAAKGYLDNIRAITNSQVTIAEIIYNLYEESKQGQSLYSNVGTYYMQSVKEFDEETVKQIDGPYRETVLDPIGKFSNYFSEIDEAIKKRAHKKIDYEQCKAKVRRLVDKPAKDAAKLPRAEKELSMAKEIYDELNDQLKAELPQLIALRVPFYDPSFEALVKIQLRFCTEGYSRLAQIQQYLDPASRDEYANGLLDGKIDDMLAQMQGLSITSLGK

SEQ ID NO: 7157 - protein, 280 aa, Candida albicans
MTVEELTDEISAIEAIYPESVTNLGPQLYTFKIPNHESVSIQLNFPLTYPEEIPQLLQIIVEKTTQSSSFTDIAYLEKHVDEILQKVFVPEQVVLFELLTELQEFFDQYVEEHPEPVIEKIEQHDDVHQELKDPTIDWIQSDPIVDRGSTFIAYVRQVNTLQDAQEYLDDLLTDKKIAKATHNISSWRIKMENGVTFQDCDDDGETAAGGRLLHLLQMMDVWNVIVVVSRWFGGTHLGPDRFKHINSAAREAIIKGNFIVDANDNTNGSTKTTNAKKKKK

SEQ ID NO: 7158 - protein, 785 aa, Candida albicans
  misc_feature (645)..(645): Xaa can be any naturally occurring amino acid
MSFFGFDPAAPPQGANKKDDAYDFENTYDGLGELEEDDAFNQETFGTSTSDIRKDFDFGQGDSQQSETHAKASAPPAQTISYAQAATVPVNDDEFMQELWGSSNAPSKNHADSTEDKPAGGQPEKKILSLEEIEAQFTAIDHSQQPPQQVPQQQFPPQPYGVPGMMPPPPQFGYMMAPGFMPPQYPYPGMIPQQMPPMQQGQFPPPQQQQQQQQQQQQQQPPPQQQPQQPPPQATGTVDKENTEAPVRSPASKKAQKVDLSNFPVLGSKEAQSHQQSAPQQQQQQQHYHHHHNHSQHYQHGHHREPSQELTPEQQEKAARRQEKVSRIMKYSGIMNPKDKDFVTRFQLSQIVTEDPYNEDFYAQVFKVIHPKTINGVQQSTQQNNSIAQAYLDHSGHRLGGRYKRADVALQRMQQQVQKAVTVAKERPKLTQYAKEGALGKISFGSGKKPRQQLEIISKAAERQKQENQVGGKKEGVKHYSKKDILSILENIIGELMNVESESRTRADVDTSKLWESLKVLEQSSSSGDEESEVNPFIQCLNYNKMLKILLRLFKFLTREQILTIVTLIMSNLENLLVIKNGSYTTYPNKKVPENIVKLVEAYTLTLSKVLMNAVLDFKFNEIIALLVILIEHNNVSFVSTTKIXLSILTTLLSRAELIIGEGSISATDLSEWSSCYDELFTSLESRIAAIFPPNPEDVDDGSSGENYIWQFLATLSLGGKLSHQRIIVDEVRDEIFGVMNRAKAIANTDMANLYKKQNLLNNLNMYLVVMGLVADETEIKELQQ

SEQ ID NO: 7159 - protein, 519 aa, Candida albicans
MSDLVKSSEVIETTEVPPHNNNNNKRHFKYDSEQRKQRLAGGVKLKDALMILCAGFALISDGYQNNVMSMMNKVFALEYPKEYTASLSTQVSNASLVGTIFGQVIIGLTADYIGRKWSIVTATCFLIFGTMMCAASHGKTVNGMFWMLTIFRGVTGFGIGAEYPSSSVTASEAANESVKRRGGAFILATNLPLSFGGPFALCIFLIVRRICGNHLDAIWRTMFAIGCFWPLSVFYFRLKMVTSELYTKSAIKQRAPYWLALKYYWPRLIGTCVAWFLYDFVTFPNGIFSAGIISNVIPKSEKNNLEKIAEWNLLLGAIALPGVFVGAYVVDILGRKYTMMIGFCGYIVFGLIVGCGYHQIKPITGLFIVFYGLMMSCGNFGPGNNMGLTSSESFATPIRGTAYGISAAIGKVGAVVGTKTFSPIQKNLGDKWTFIIAAICGLAGVLVTFIFIPHLKDEDLLEEDVKFKNYLIDNGWKGKFGIQEYDEEEDLEGSSEDSSDGEIVKNNTKNDVEKVDALK

SEQ ID NO: 7160 - protein, 181 aa, Candida albicans
MGLSFSKLFANLFGNKEMRILMVGLDAAGKTTILYKLKLGEIVTTIPTIGFNVETVEYKNISFTVWDVGGQDKIRPLWRYYFQNTQGIIFVVDSNDRDRIAEAREELQQMLNEDELRDALLLVFANKQDLPNAMNAAEITEKLGLHSIRQRPWYIQATCATTGDGLYEGLEWLSTNLKNSS

SEQ ID NO: 7161 - protein, 785 aa, Candida albicans
MTTNQSINTTTTTTTTTTTTTTTTTTSSTQSISPFVPYHPNTHIFIMVQNQKTPNHNNSTLYISPVVNKKNDLMYVTPPNPTTVTTNKLLETPGSNKSTSTSTSSFFHFDRASNHTLHDRVTDNNLLDDPLTPVDKLRLWRHDAIMQHQYKTAEFIGDKILELTNDDANDAFWLGQVYFNQGNYLRCKNLLTSNINYQNSISCRYLAGYSLIKLEMWDDALDLIGETNPFKNNNDSGSSSTTTTTDGGIKLESSMCYLRGLIYANQNNFERAKECYKEACIVDVKCYEAFNELIMNNLMTPNEEWEFVMTQLNFRDNLDDTNNDELIKLLYMTKLSKYLNPDKFNESEHILKEEYELYDNCDLMLSRADYLYIQCNFDECLNLCERILNKDEYNFDVLPNYLSCLYELGGKNKLFLKAHQLAELHPINPMTWLAIGTYYLSINKMVEARKFFSKATLLNPNFGNGWIGFAHTFAAEGEHEQAISAYAFAARLFPGTHLPNLFLGMQHLQMNNLNLSEEYLLASYHICNSDPLLLNELGVINFHKNQFDKAEFFLQEALNAAKNLNSDSKTWISIHANLGHVYRRANQPYKALDCFNQVLKISNKNDANILSAIGLIHLRLQNIFQAIEFLHDALAISPLDPIASDLLKRALEANKENQEIFSTTEKLFQLNLPIERRKYESSRLAKQQRQSRCSISGGGGGCGGEENTKNIVTPLTTKIRDRHINVGNSSIDPVLFVNDPTGKNEDIQDDGEPEGEGDDVTLLAQELQNGEASSDDEDVMDIESD

SEQ ID NO: 7162 - protein, 443 aa, Candida albicans
MSYNNGGYNNRNGGSYGGGYGGGGSRGGRDGYSGGGRGGGYGGGDRDQGGYRGGRFSGGGRGGGRFNDAPRQELTAPQWDLEQLPKFEKNFYSEHPDVAARSDRDIEQFRKENEMTVKGHDIPHPITTFDEAGFPDYVLQEVKDQGFPKPTPIQCQGWPMALSGRDMIGIAATGSGKTLSYCLPSIVHINAQPQLQYGDGPIVLVLAPTRELAVQIQTECSKFGKSSRIRNTCVYGGAPKGPQIRDLARGVEICIATPGRLIDMLEAGKTNLKRVTYLVLDEADRMLDMGFEPQIRKIVDQIRPDRQTLMWSATWPKEVQQLTRDYLNDPIQVTIGSLELAASHTITQLVEVIDEFSKRDRLVKHLESALNEKDNKILVFASTKRTCDEITTYLRSDGWPALAIHGDKEQNERDWVLDEFRKGKTSIMVATDVAARGIGMYNF

SEQ ID NO: 7163 - protein, 630 aa, Candida albicans
MSTNPEKPTRNEDLFENSSSSSSVPHNKEASELESVNSTAEREGGEHGNILAQYTEEQVMQMGRNYAHKYDLDPDLFGRAAALARAPSAFNSMPFLTDEEKQGLYLEATKKWHIPRKLIEVIAVGAIAAATQGMDESTISGATLFYPKAFGVTEMKNADLIEGLVNSAPYLCCSVIACWTSDYWNRHLGRKWTIFWTCLISAVTCIWQGFVNNWWHLFIARFFLGFGIGVKSATVPAYAAECTPKHVRGALVMLWQFFTAVGIMFGFVSALAFYYVPHKSFGTGLNWRLMLGSACIPPIIVLFQIPFVPESPRWLMGKERHKEAFESLKALRFEEIAAARDCFYQYVLLKEEGTYDIPTWKRLIQMFTIRRNRNGAIGSWIVMFMQQFCGINVIAYYASSIFIKARYSEISALLASWGFGMINFVFAIPAFLTIDKFGRRNLLLFSFPLMGVFLLIAGFGFLIHDRQGQLAMVTTGIYIFSAIYSSSEGPVPFTYSAEAFPLYIRDLGMSWATATCWFFNFILAFTWPRLQNAFTPTGAFGWYAAWNVIGFFLVLWFLPETKGLTLEELDDVFAVPMYEHAVYRTKELLNGFQRVILRRNIPPMPPLYHHQRMAVTNPEWNDKTEVDHIE

SEQ ID NO: 7164 - protein, 897 aa, Candida albicans
MIPRNGRLIMKSRALPLRTFVLLRSSAHNTHFKNVSTFVPTRNLGFLKVLTRAVKMPAYIGGTMAAGGTYVAYKVEQASSYTQDKLSAFKDFADGVFDKTGDFFKNLGGTDGATGGNGAEDGASSGGAGGGGGGGGGGNDTATAVGATAAAVGLTSDEDESTEAETDIEEEDEETLIEDDSDDDDDLANDETDDHMLNLTRQMIEIRNLLSSLNHDGIKLPSIVVIGSQSSGKSSVLESVVGQEFLPKGSNMVTRRPIELTLVNTPEAAANVAEFPALKMYNLTDFQQVQKILFDLNMAVPASECISNDPIQVTIRSPTVPDLSLVDLPGYIQVEAADQPIELKTKIRELCNRYLEPPNVILAISAADVDLANSAALRASRLADPRGERTIGVVTKLDLVDPEQARKILLNKKYPLKLGYVGVITKAPHPKASASGLFSRKQVTGYQAFVAQQNFEHTFLKENKEAFFGCTVGTRNLKKKLMKVLEKTMAASLRPTHLAIQQELEETSYQFKVEFNDRPLTPQMYLANNIDMLKLGTKDLSHNFSRNELKAILKNALDQKVLDLMAERYWNKPFELKGSSVEPDLRELTQINIDNDIYWHKKLDLTTSSLTKLGVGRLSTNLITNALLTEIDNLVDNTQLRNHPMAKSAVRDAARSVLGNKYYSTADQVENCIKPYKYEIELEDREWQTSKENAVTLLKEEMRQCEEVYHDLKSQVGGRKLQQVVTYLEKLKQSNNSDVDLTTNETLGFSPTLIQRGKEAIFLKERISLLKMRYQFVKNSKKCKKKESKYQCPEIFLDAVASKITSTSILFLNVELLSDFYYNFPRELDLKFFNNLSKDEIEKFAKEDPKIKKHIELQERKDLLENALSKVESVLAVQRTTQKDNTEDRNKKSVFGW

SEQ ID NO: 7165 - protein, 564 aa, Candida albicans
MNSRPAPPQPRPPQQQPQQPQQPQPNQQRLPFRPDESRARRLNQPLEQHANPINPSNFAAREYTEQEHKDIQTKLNKSLGPEFISYRDGPGGTRVQYIEGWKILNLANEIFGFNGWNSQIVSCQVDFLDTHGGSGKFSVGISMVVRITIRDGTFHEDVGYGSIENCRSKILALERCKKEALTDGLKRCLRCFGNVLGNCLYDKTIVAQMKKLKKFPIEFDPNDYYRDPLLVERERKKNIIEKQHEEQKRQQEDASRLDNSGQQVQHQQQNNSNVVSNGSIPVNGQQNHQNKGSDIVEPLEANQGNTRAGQVPQLSHHAAAFVTPKSPTKVVSYVPTSKEAEELDDSFMFSDDIFDGESQSIYYPPEVREHEQNQQQQKEENQGVARNGATKETTNNGRSENRPQNESMAVDQNPPVLMNAFVTAKSAEVLQQSPTVEAAAKNIVQFDPKFVSPNMRRTVDPTKSVPIKRSDIKNSVATTPSPLGVNTSSNRINKPMITSNNNNNINNMGKRIGMPPQPRTNKLVNSGNNPSSGIPHTVSTSVNGASGNENVENNSTIANTTVNQ

SEQ ID NO: 7166 - protein, 707 aa, Candida albicans
MADAKVETHEFTAEISQLMSLIINTVYSNKEIFLRELISNASDALDKIRYQALSDPSQLESEPELFIRIIPQKDQKVLEIRDSGIGMTKADLVNNLGTIAKSGTKSFMEALSAGADVSMIGQFGVGFYSLFLVADHVQVISKHNDDEQYVWESNAGGKFTVTLDETNERLGRGTMLRLFLKEDQLEYLEEKRIKEVVKKHSEFVAYPIQLVVTKEVEKEVPETEEEDKAAEEDDKKPKLEEVKDEEDEKKEKKTKTVKEEVTETEELNKTKPLWTRNPSDITQDEYNAFYKSISNDWEDPLAVKHFSVEGQLEFRAILFVPKRAPFDAFESKKKKNNIKLYVRRVFITDDAEELIPEWLSFIKGVVDSEDLPLNLSREMLQQNKILKVIRKNIVKKMIETFNEISEDQEQFNQFYTAFSKNIKLGIHEDAQNRQSLAKLLRFYSTKSSEEMTSLSDYVTRMPEHQKNIYYITGESIKAVEKSPFLDALKAKNFEVLFMVDPIDEYAMTQLKEFEDKKLVDITKDFELEESDEEKAAREKEIKEYEPLTKALKDILGDQVEKVVVSYKLVDAPAAIRTGQFGWSANMERIMKAQALRDTTMSSYMSSKKTFEISPSSPIIKELKKKVETDGAEDKTVKDLTTLLFDTALLTSGFTLDEPSNFAHRINRLIALGLNIDDDSEETAVEPEATTTASTDEPAGESAMEEVD

SEQ ID NO: 7167 - protein, 453 aa, Candida albicans
MKFTTLATIASTLLFAANANADTCNPLKSSDCSPVPALGSSFLEKFDNGLGPHFESLKKQGTIDSGSNGLSLTMKKRFDNPSFKSNFYIMFGRVEVVLKGAEGKGIVSSFYLQSDDLDEIDIEMFGGDPYQWQSNYFIKGNTATYDRGGYHDIANPLKDYHTYVIDWTKDAVTWSVDGSVIRTIPKDNAQGFPQSPMAIYAGIWAGGDPSNQPGTIDWAGGITDYSQAPFTMGIKSVLVADYSSGKQYSYSDQSGSWESIKADGGKVNGRYDQAQDDIKKLESGQSVDSNDSSSSPSASSSDSSSTSSASSSSSSSSPSSTTSSSSSSSSSSSSSSSSSSEKSNAVPSASVIVFIGTKGGDKTTVTSSSGVSVPTSASVSTAAGTTSGSANSAPASAASSTASTVFISTGDAAPSSSASEKPSVSTTENNGAVSVAKTTSLFGFVALIGFLFV

SEQ ID NO: 7168 - protein, 1645 aa, Candida albicans
  misc_feature (888)..(888): Xaa can be any naturally occurring amino acid
MSSPNTSFHSDSNFESAVQDLEQEKKMVAALKRLSIGHMMQYDPDLPPGSMDDIDPFANNNNNSNTASNNNHYNGHTRDHTSNNNNTHNHSPNSKLNHHRGQSPYDEDLIPQNIHRSHSTRSRSKSHSTSPSTSPQHKQQQQQQPQPFPHEPQTPPYNKSPSPVKRRSFYDNSSVLTSESHDIFFDAEDEVYDSSSPLLWVPANSHPQVNPESFKSLIKTQVEEILERKLSRKSTISRKSTLSRSSSTSTKETLAPEPEISPESECDVSPPSPVRKSSLSSSSQQNQNEDVSRKSSSSVSSTSPQKDPAKRESWYFNNSKRYSNPSLRELTSELEQLSKMAGMDKNDAVTLARTLSAQSLGYTDVEKLAFDELDSSQTTATATTPNSSGSPGSYDSANPPRTTTLHLQQRLQHQFQQAQIKAEREAERSTRHQQSEQQWPVSNDDSHKSSSQLTASEGGSTANAFTSAGSGADFALKRSRRTDYRKKETDSKQKTSNNSPPTRKYNVRNSQLLFNYKKPVDSPSSSPSPSPSTSQSMMGHRVKHKKSQKPLEAALANPMMDGSDMSHNPYPTASTTIDFSRMGAKKSARQSLSPENAMDGRSRTKPENKTHRGYSHQERSHPYHQQPQPQVQPQTRQQLPPAQQAHRQSTRQTHNHPSTGVEKHHRQDNKRVMSSASNTDINDFMAQSNQFQTNGTRNHRYDNLHKKDKTAFLPNEDHQRKSHSTRNSNVRNLSSSSQQHLHQPYSTTSVAPKSRQLHQNLDKLRSEINEFKESLNKSELPGEESKREHRSRHDQHHQQRQRPAPSQHQLEPRNYNHNDRHQRQQHEHVQPQQVQPLQSDTSFDISYQDLSVEDQLGIEQEALRELGKEKGHSHEIDIDDAFDENLKXSPINERHGSQFTLDHDILDSFNLVDNQLVGSADEGIDNLKGKNEIPVGRQQPQQQRQQPRAASPPSSQQYLGHDELHLQQGKDTNKKVGPRLSIDTLQNKPIHPEETATGFGMNALPSPTLHLDESQNSTPGHSRKASNSASYDDYYNIADKSSTAGTPKTKKETKVKTKLFNKDPNLEIIDSDNYKEKMGIETSNNKKLKKKKSFGLLSTTSSVGANDTSENEGPKKLKKKKSWGWLRERSASASSADINNLPPLPLDKLPTRSFSNPETSTDQHQKHDLENGSDLERELEHEPELELELESDLEFDYEQQRKHQDASMVNDSSFAVDSISMKSTDKENVLSKFFKKKAKVPGSSSQSVFSFESKGSGASVDYESDNDAKSIKKKGNNSSRLFKKKSRAKLSEQENSVNKEKLRPLNLVSNESQTIEEKENLRQSNGTRKAERVESQEQQEEQFPVTSSPIHQFNIEHLKDDFVTLGEKDDVLDSGTDDLVEDVRSRNIQSTIVIVDEDETPIQNNNDNKDLGMLKVDELSKKKSISRKKRNNMQKKNLSTELTDTNKEVVEEVLATEQSVKPSQGEDLLSKNEDKEKLDIQEKLKKSIKRTSRANQPIEFTDSAFGFPLPPPSQSTLVMLDYRFPVHVERAIYRLSHLKLANPKRSLREQVLLSNFMYAYLNLVDHTLHLEQQNMSSEDGDQMERDDDEEEEMTDTDEKDMIFGESNIADDDDLIPEEANGDSIGINLDMDGLHRKQHHQSGIEV

SEQ ID NO: 7169 - protein, 798 aa, Candida albicans
MPPIGSSDQFIHQITQQFVFQRLWTGNATTPELAPASTPYNRLVCRNNTDLFYATGNIVRCCTISPNHKNYKLFKVENQFYEVASLLMNKSGTLLAIIGEEQVDVVSLPTNVMKSSGIYVDGASFKIKNLRGKVRKCVWQTVAANDSTLVVLTDNSQIQAYDLTKSLEVPVIDVDLKRYANFANEEAISIAFGSSKNLAGGLTLYVSTLSNIYAIYPFSAKFGNLATTKEAIDIALEDTKAAMELIQEKYPVNLLDTATSTLNKAAIRQFEYYSHFKSQLSGALPIIKEVRDTHTNNPYELFVVSQTLSDWTGYSLQGPLISSNAGIKDLASIGDNDLVSILASIDANATVTYYAQLAPMLMKYNIMSIASEGAPSESSQTVCKPKYVKPKRGFGFIDNSEEEEKALVKSKQSQESFWKEELTSLDLLQRDKLPVDENDDATGFPTFFGEIDSNRFSVCVNSNKLVLVDCSWVKTFVDDLKEDKIDSVSITANYGITSTEKEPITAFAYIKDDVTSTGEYLTVCRSKLVNDMEVIQIVDKAVSDQEEATSTLLLTEEPYKELPLTYIPSKPFSELEEELESLGKINIGADVKGNEDLNSLTVDSLSNLNSLSVRTIQVASSYTIFGIKLQSRILANLDSLKEQLHILEKVKNEYDGDQKDHTEKLEKLTEKQAKLDERMIKLQQKIFDGLNKFKQDKTLPISEAERNWFKEINSINALVNSSTDNEVGLTKKIENLSLQVRSIIEDSGKEKKPKLTAVEQLELEKRLSKLKNWLQREDKSIEILKDKLTNSLKLIGDK

SEQ ID NO: 7170 - protein, 214 aa, Candida albicans
MPSSLEPSSKLALKGSSKIVCDYFEFALNSILYQRGIYPQEDFVTVKKYDLPMVINDDYDVQKYINNIMKQIKKWIYGSLMSKFIIVIVSKTNLENIERWEFNIETKDQEETTENGDGDGDGVGKSRQEIQKEIRTIIRQITSSVSYLPVLKDDDEYTFNVLVYTDPNTSVPIEWCDTQGDGKVLDGDNVDNVKFTSFSTDIHQVGTSVSYKYE

SEQ ID NO: 7171 - protein, 146 aa, Candida albicans
MVKKVLLINGPNLNLLGTREPEKYGTTSLSDIEQAAIEQAKLKNNDSEVLAFQSNTEGFIIDRIHEAKRQGVGFVVINAGAYTHTSVGIRDALLGTAIPFIEVHITNVHQREPFRHQSYLSDKAVAVICGLGVYGYTAAIEYALNY

SEQ ID NO: 7172 - protein, 339 aa, Candida albicans
MTKMSNPLKVIDISEDSITTARELLDAATSQGFLFLEGHDFTQEEVDKLFELSKSFFELPNNYKSKYPVDSSNHGYVMMGKENLDPNGQKQGDPKEALNIANLNFETGKSLNIIPDWISENQERDELISNTILRLYRLSIKILRMLARALEIEDDETHRIKGENWFASKYASDSESGSTFRLLHYPCQTSLNPESVIRAGAHTDYGSMTLLFQKENQEGLEIFSPISKKWEQVPFIPSTIEKMAPPLVVNIGDLLSYWTAGLLKSTIHRVKFPAKAQELGQDRYSIVFFSHPSDNALLEPVPSEIIRKIEGRGANKETTYITAKQHLQKRLAATYGWKK

SEQ ID NO: 7173 - protein, 246 aa, Candida albicans
MFKQIITSSSTKSTRLFTSSTLKYLSTSSSLLKPTLAAAAAASITTTTTTTDNSSEYLTTGGSTHSIPAKGFRLSQPKTWEESNESALSKATKFLFLSEIARGMYICLEMYFRAPYTIYYPFEKGPISPRFRGEHALRRYPSGEERCIACKLCEAICPAQAITIEAEERIDGSRRTYKYDIDMTKCIYCGYCQESCPVDAIVETPNVEYSTATREELLYNKEKLLENGDKWEQELQYCIDADAPYR

SEQ ID NO: 7174 - protein, 572 aa, Candida albicans
MILTKENSSYSYANDFDQTVTLCPSESTIDATNLDFILTTELPFFPLDYQDYPLMDLTTEELLQDKFPNTKFPYDGFINFHSLKICSSNAKQMSKYLQLAMGFKEVAYKGLETGSKLIGAHVMQNGSITLEIINTLETIDDDNVLKFPFLQNDLNKFRNINHEYFLENFKLTTDDLIFDFVNSRIESLSFKSDYLKFGKQFYNNIIRSDDYQESMAKVSNFIVQTINNSEEIYNDMMECTLIQKFLKLHAEGVMDIAFNVNDVDTIFNRAIKAGSGIIRLPKIISDENGVVKLATISIPNSDIQHTLIENINYTGPFLPGFSQPIYPLADYYQVQLNMMPPVNLTVLDHCVENYSWNQMMEQAKLYADMFGFHKYWSVDEDDISTGFTALRSIVMSSSNGQIKMPINEPVKSIMKGQIEEFNDFNGGPGIQHIAFRTNNIIETVMALMQRGVEFNHTSENYYNNLKQRLNNDGIKLYEDFDTLRSLNILIDYDPSTKPKPKPKPKSKRKRNNKCNYLLQIFSKPLHDRPTLFIEIIQRHHHNGFGKGTFKGLFESIEEQQKLRGTFVKSQNN

SEQ ID NO: 7175 - protein, 326 aa, Candida albicans
MSVRSIAKVVTPNPPRPGSPVKIRNSIGSSNQFNPFLLFDHFTIPSTGGFPAHPHRGQETITLVLKGGVAHEDFTGSKGVLYPGDLQFMTAGKGVVHSEMPVPNEDGSPSVGLQLWVDLPNDMKDVKPRYRDLREWEIPQVVADDGKVIVKVISGKSHGVESQKELAYTPINYYHYKVKAGGKFKQELSPGFNYFLYVLNGKNLKLNGNTTVDKYQTAFFNETGDYITGENTATEETEANESEFVLIGGKILNQKPVQYGPFVASSKTGITKALLDYELARNGFEHRVKWNSLISRGVNKSMVTGPLNGCLKKRAADKKSYLDSKI

SEQ ID NO: 7176 - protein, 770 aa, Candida albicans
MFSRLVSYRYPIGVPLKQANRIMSNKKQQSLARFFGGITPPSGSNSTSPEKQQSLTRFFGSSSNNSSPKKATTEAKQKREATPPKSPPRSKKARIETKSDESSSSSSSNGDIEMETEPKLEKNNGSGNDVRNEAEELIKLSESEQAKHSNEKLGVKIPYAKLASVFEAIENESSRLAIIAIISQFFLEVLQQSTIDKLIRIVYLCINRLGPDYEPGLELGLGETILIKAISECYGRETSKIKADYKSTGDLGLIAQKSRSLQPTMFKTAPLDVDTVFDNSLKIAKSTGKESQSKKISIIKQMLTACQMKSSEAKFLIRSLQGKLRIGSAEKSIIVGLAQAFVNYENKSNKKIDPSKLAEAEEIMKEAFSRVPNYEVVLKTAYQYGIFNLLEHCFVTPGIPLKPMLANPTKSIGEVLDRFQNEEFTCEYKYDGVRAQVHILSDGSIKVFSRNLEDMTQTYPDLISIGKQFAVSGNTISMILDCEAVAWDREDHKILPFQKLTTRKRKDVNEEDIKVQICLFAFDLLYYDNESLLPKSLAERRKIMQENLSPIEDRFQFATATNSSSNLEVLQQFLDQSIKDSCEGLMVKMLNGSESFYEPSKRSRNWLKLKKDYLEGVGDSLDLVVIGAYNGKGKRTGTYGGFLLASYNEDSGDLETCCKIGTGFSDEDLLNLYNKLHPTEIASPKNYFVYDTNNSNAVPDVWFEPSMLFEVLTADLSLSPIYKTGHQEFGKGVSLRFPRFIRVRDDKGIEDATSSDRVCEFYQRQAHVNN

SEQ ID NO: 7177 - protein, 1022 aa, Candida albicans
MDDEDLYDEFGNYIGDSLDSSDNDDDDENQDDLFAAAQPPSINDNEYSQDEEEEEDANGKSQLVKTTTTNSNDTALVKTNIDTNQAETIYIQSQTQSLSNQPIIQPNHEKTMKLEYSIDNNDPLTNNFPEVNYSRDYLISLLNQSPERIRNVSIIGDFQSGKTSLIDQLIMYIHPKINIKKYLDNHKLEIERELTIKSSPITLLLSDSKSRSQILNLIDTPGHVNFEDETLAALNITDGVVLIIDAVLGMTIQDQYLIDEVIKQRLSMIIIINKFDKLILELKLPIKDCYYKLVGIIDDINDYIKSITTTTTTTTTEKKKEYKYKYKFSPDLNNVLFASSKFGIIFSLKSFAKLYITKQNSLMNIDQFSKKLWGEIYYDPQNHKFTTTTTTTTSTTTTTINNNNNNSLKHSFISFILEPIYKIITYTITNEPTDKRLSKLLWENFRISLPKFEYKKDAENLLKSVFQTIFNNYESFVDSLIEMIPSPAKQQPNNSFSSSSSSSLSSVDTLARVTKLIESSDGKSFSALVRIYKGGLTMGDKIKIYGENYHEDKDDYKLEIIKKIYLPGGRYNFPINQASLGNIVLIDGIDSIIKKGSAIITNESTNDTKDIDKLSFVPPSPPKYTNNSVFKIAIEPEIPSELPILLEGLRKINKSYLSSIINVEENGEHIILTKGELSMDCILHDLRFFFCDDLEIKVSDPMVKFSETCIENGYIRTSTTTTTTTTTNEDKDKDKDSLLSMTIIVEPIIDYKFSHDIEIGKLKFDNIDIDSKQLIKILKTEYGWDSLAARSLWAIGPINDLQNPSILLNDTLNQHHQQDNNNIIESIKSSIISGFKWSINEGPLCEDQFRNVQFTIIDIPADNNNKTPPSDNNNNNNKLLLSPAQIIPLMRRACHNAITNAIPKLMEPIYQLNVICSYKAINVIKHLLLNKNPQQQQQQHQQQQQQQQQRRGEIDTVTPIPGTPLFSIKGYLPVIDSIGILTDIKLNTQGQAIGSLKFNYWEIVPDELSEEFIIKTRKRKGI

SEQ ID NO: 7178 - protein, 192 aa, Candida albicans
MFNLVTRAQAAANSAFTSSIVITSVVIVLTLLQLYKDNVWSLNTTSITNIRPTASIKQSFHYGSLNRKPKENAKIQFDLSSDLTPLFNWNTKQIFIYLTAEYPGKSEGSSNKVTFWDKIITNKEDANLTLTNQRGKYSVWDVEKSFRGRNATVRLEWNIQPYVGPLIFGSTEGFGEFQFADTQKKKESTKNT

SEQ ID NO: 7179 - protein, 1096 aa, Candida albicans
MRRAKCKEREKSREEKKNHNIRILHFNTNQLSLHSQSQLNIEMFGGGASSGFGGFGSSTTTNNSPFGGGAGAGAATTNTGASPFGSTNTNTTGGGIFGSNANSSTGFGSSNAFGASSNTNTTPAFGGNTGGGLFGSTANGTGSSPFGQQQQQQQQPQQTTSAFGSSNNSGSVFGSSATGGGLFGSKPATSTFGGFGSTTANASSPFGASTTNAFGGGASVDPNVNNGTAAKQFTPFTEKDSANMTNVFQNICCMPEYKNFSFEELRLKDYEQGRRFPPAGATANAGFGGAAGTNATGGGFGFSGAATGASPFGSGTAGAANPSGSAFGSAFGSTFGNKPAGTSPFGAASTTGAFGGTNQNQSPFGSNTAGTFGSGASNTFGGGANSTFGKPATGFGSSGGAFGGNTNTGGAGGGLFGSSGNAFGGQSSSGFGAANNSSPFGQAQSNNAFGGANNNSPFGQSNTQQQSGGLFGSGTGNAFGSNTGGSTFGSNNTGFGAGGNAFGQQGNTGFGANKPVTTGFGSSTSGGLFGQQSQQQQPGATGGLFGQNQQQQQNAGGGLFGAKPAGGSVFGQSNTNASGGGLFGGQQNTPTTGGGLFGSKPAASGGLFGGQQSGQAQQGGGLFGQQNQQNTSGGGLFGNKPTGPTTTNGGGLFGNKPATGGGLFGGQQQQTQQQQQPQPSQLGGGLFGAKPGTTASSGGGLFGGQQQTSNVGGGLFGGGAASTGGLFGAKTNANATSNSTSTGGLFGGATTVQQQPQQAQQALASINSQNPYGNNPLFQSITGTSSQQQQQQQQQQQTNNLPQFSLVKSAAPIKKAVTLGSTSQKVTPLFKVSSLPTKTSTELVKEDTVKNKKTDDLFSAATDQAIISSDIFRPKESFKSLVLDKSKASNALLTESSSGPTKQVTFVLDKSESKELSASTPEPLDKDEKSKLELQGEQQKQQQGQDQDSDVDSEGYWMSPSLQELKKKSLLELKSIPKFKIGRKHYGELEFLEPVDLTSIVNLDDIAGNLVTFSNKTCVVYPDDNKPKPGEGLNLPARITLEGCYPINKADKLPILDPKSEIVKRHIENLKTIPEMKFISYDPTNGHWTFEVQEMD

SEQ ID NO: 7180 - protein, 281 aa, Candida albicans
MSDLGFDPSLKKKKKSKKVASVVDDTDSKESTPQPGDASVDDLFSGLKKKKKSSSKKSAEESGSPSVDEDLSSSLGDLTLKKKKKKSTKSLDLNEFEQQLEEAGVEDITESTNGATNDQSAIGLSYPDLLSRFFDILKKNNPELAGDRSGPKFRIPPPIVQREGSKKTLFANVQEIATVLQRSPEHLIQYLFAELGTTGSIDGEKRLILKGKFQPKQMESVLRRYIIEYVTCKTCKSMNTELKRESANRLHFLSCKACGSTRSVSSIKTGFQAQIGKRKKF

SEQ ID NO: 7181 - protein, 535 aa, Candida albicans
MSQSLIIFKPSGKVEYQLNNKIHPFNEFISSIVNETYTTISLNFTTKTLNNRRFYCYNKDNIYVALYFDSITTIDNDQIKQTLAGILKTFNKLEPESDGEKLKKLVDLQFNNLMKLKQQEKVQEPTIASPARSGSSTPKNIEPKQPTNSKKMRKWDNGEIVEANDGKALDYSGNQDAVGSESLPELKIDKSAFTKERDLVLVNELNDILNESDDEGEQVDETNGSVGSGFFSKISSYLGGTINVDEVSKKFREQLITKNITPGIATTIIDKIKTKLSSNKKVTMAVYKQALTDELTKILTPNVSTDLLHDIKRNAELNTRPYVISVVGVNGVGKSTNLAKLAFWFLQHNLNVLICACDTFRSGAVEQLKVHVTNLNRLNEASTNTKSRIDIFEKGYGSGDHVVQTAKQAVQYAEENKFDIVLIDTAGRTHSNAKLMAPLKKFGDAANPNKIIMVGEALVGTDSVEQATNFNKAFGNKRTLDFFIISKVDTVGDLVGTMINMVMATNVPILFVGTGQTYTDIKRLSVKQVVEMLMK

SEQ ID NO: 7182 - protein, 732 aa, Candida albicans
MSETFPETNTPVQTPSTESFVNKMNAGDKTIGNNIFSQDSDSNQQSSHQEPLSPPNPSPTPEKRQLDDEVDNSIEPESKKQKVEEETEASQTGVIQTEVSETVPEIESSVNKDSEPVNGVSEESENTNNEQEKPQEEAPEENPQEEVPEAKPQEEASGENPQEIPNDKPQDDEPDIQEVDPPKPVVPVFTEPAPKPPQEPDMNNLPENPIPQHQAKFVLNTIKAVKRNREAVPFLHPVDTVKLNVPFYYNYIPRPMDLSTIERKINLKAYEDVSQVVDDFNLMVKNCKKFNGEAAGISKMATNIQAQFEKLMVKVPPKELPAGTNVAEATSVATSPTTNKRKSVAESSSSHQHRDSVAAARPKRTIHPPKSKELPYETKPKNKKVAAELRFCNQTIKELMSKKHYNYNFPFLAPVDTVALNIPNYNEIVKQPMDLGTIQSKLANNEYENADDFEKDVRLVFKNCYLFNPEGTDVNMMGHRLEAVFDKKWANKPVPEPTPQNSDVSDREYSSEEEDNVEISEAMLSEIPAIQVMENQIIRMRKELDELKKEHLKKLREQQAARKKKKQQKGKRRAPKAKHTKDTQHQVQAPPEPPKLTPPQPVVTYEMKKQVSEMVPNLSDKKLNALIKIIQDDVQISNDDEVELDMDQLEDRTVLKLYDFLFGDKALKNSAGKKKKPVANNNLDELAHLRSQLALFDEGVNGQQGSDNGFMKVVNQEESSEDEASSESSEEE

SEQ ID NO: 7183 - protein, 253 aa, Candida albicans
MGVIEIESEQQFTELTKADPSKLIALYFHTPWAGPCKTMNQVFKTLADSKESDNSIIFLSINADELPEISEIFEVSAVPYFILIRNQTILKELSGADPKEFIQALNQFSNNTNSTTTSNNDNVQASINSTTANTNSNNTTTNAPEVEESEEALNERLNKLTKAAPIMLFMKGSPSSPQCGFSRQLVAILREHQVRFGFFDILKDDSVRQGLKKFSDWPTFPQLYINGEFQGGLDIIKESIEDDEKFFEHALEA

SEQ ID NO: 7184 - protein, 517 aa, Candida albicans
MKNFNALSRLSILSKQLSFNNTNSSIARGDIGLIGLAVMGQNLILNMADHGYTVVAYNRTTAKVDRFLENEAKGKSILGAHSIKELVDQLKRPRRIMLLVKAGAPVDEFINQLLPYLEEGDIIIDGGNSHFPDSNRRYEELAKKGILFVGSGVSGGEEGARTGPSLMPGGNEKAWPHIKDIFQDVAAKSDGEPCCDWVGDAGAGHYVKMVHNGIEYGDMQLICEAYDLMKRVGKFEDKEIGDVFATWNKGVLDSFLIEITRDILYYNDPTDGKPLVEKILDTAGQKGTGKWTAVNALDLGIPVTLIGEAVFSRCLSAMKAERVEASKALKGPQVTGESPITDKKQFIDDLEQALYASKIISYTQGFMLMNQAAKDYGWKLNNAGIALMWRGGCIIRSVFLAEITAAYRKKPDLENLLLYPFFNDAITKAQSGWRASVGKAIQYGIPTPAFSTALAFYDGLRSERLPANLLQAQRDYFGAHTFKVLPGQENELLKKDEWIHINWTGRGGDVSSTTYDA

SEQ ID NO: 7185 - protein, 378 aa, Candida albicans
MSSFGTLFKVTTYGESHCKSVGCIVDGCPPGMSLTEADIQPQLTRRRPGQSKLSTPRDEKDLVEIQSGTENGLTLGSPIGMIVRNKDHRPGDYSETDLYPRPSHADWTYIQKYGTKSSSGGGRSSARETIGRVAAGAIAEKILAKVNNVEIVAFVSAIGEISMSKSPQDAKFQELLNTITREQVDGVGPIRCPDANVREEMVKVIEKYRDAKDSIGGVVTCVIRNCPIGLGEPCFDKLEAKLAHAMLSLPATKGFEFGSGFEGIKIPGSKHNDAFYYDENFGRLRTETNNSGGIQGGISNGENIYFSVAFKSAATISQEQETATYDGKSGVLAARGRHDPSVTPRAVPIVEAMTALVLCDEYMIQQARTSTRLLVQDN

SEQ ID NO: 7186 - protein, 767 aa, Candida albicans
MVQSSVLGFPRIGGQRELKKITEAYWSGKATVEELLAKGKELREHNWKLQQKAGVDIIPSNDFSYYDQVLDLSLLFNAIPERYTKFDLAPIDVLFAMGRGLQKKATETQAAVDVTALEMVKWFDSNYHYVRPTFSHSTEFKLNTAAGIKPVDEFNEAKALGVQTRPVILGPVSYLYLGKADKDSLDLEPISLLPKILPVYKELLQKLKEAGAEQVQIDEPVLVLDLPEAVQSKFKEAYDALVGADVPELILTTYFGDVRPNLKAIENLPVAGFHFDFVRVPEQLDEVASILKDGQTLSAGVVDGRNIWKTDFAKASAVVQKAIEKVGKDKVVVATSSSLLHTPVDLESETKLDAVIKDWFSFATQKLDEVVVIAKNVSGEDVSKQLEANAASIKARSESSITNDPKVQERLTTINEALATRKAAFPERLTEQKAKYNLPLFPTTTIGSFPQTKDIRINRNKFAKGQITAEEYEAFINKEIETVVRFQEEIGLDVLVHGEPERNDMVQYFGEQLNGFAFTTNGWVQSYGSRYVRPPIIVGDVSRPKAMTVKESVYAQSITSKPMKGMLTGPVTILRWSFPRDDVSGKIQALQLGLALRDEVNDLEGAGITVIQVDEPAIREGLPLRAGKERSDYLNWAAQSFRVATSGVENSTQIHSHFCYSDLDPNHIKALDADVVSIEFSKKDDPNYIQEFSEYPNHIGLGLFDIHSPRIPSKQEFVSRIEEILKVYPASKFWVNPDCGLKTRGWPEVKESLTNMVEAAKEFRAKY

SEQ ID NO: 7187 - protein, 453 aa, Candida albicans
MIPIRSSITRILPNGFSSKLFLRQLNKKSKPNPHKNKNFDSFNEVFIHKTLLSSINQHNDTDYVRCSIFNANGDMIQHGKEILKSQFIKRYNLTPRDFRKFNWQRSATGTTTSSSSSSSSAGQTSSGTSKSSSLSSSSSSPHSTISALSLSNSSLGSSTNVDIVPNITIRRNSILVQLLNIRALINHDQLIIFDNSSSFQNSHVSSYTHSQFLKDLSQRLKSTNLDGLPFEFKALEGILIYIVSNLNMEMKVHNTVLQNIITGLEDSIDRNKLRYLLIESKKIHQFHRKITLIKNCLEDLLENDDELNDLYITEKFNSEGDGQPRQGTNHEEIEMLLENYYQTIDEIVQIVENLKNQIKTTEDLINVVLDSNRNQLMLLGLKFSTGLLSMGVALYVSALYGMNLENFIEEIDGGFEVVTVVSTIALIALLLFSVKQLKKVEKVTMTSLNDQRK

SEQ ID NO: 7188 - protein, 589 aa, Candida albicans
MGSIFKDGRRILVRPKSLIICLCLISIIFTQLIRYQYQLIADEVQPTINEDHSSSQSLKNTKLNSTRSSSPISPPKSLNKLTSQEFWEHIFNIFEINKFDDGLKPLIKYTPKEQQLTTKIKTRDWLLSKANIFHKDIIRQYHESVLRNLPSKLPKSVYTPNTYGIVTIGGNFYSWMAYIQLLQLRKLGSNLPVEILIPSIEDYYKEAHFCDHVLPQYNAKCILVPEKLGFNVAKHWKFSSYQFKALALCLSSFQHVLILDSDNVVLSKPEKVFDSPVYRDNGMVLWPDYWERTISPEWYDIIGKPVVGNKQVRTGRFPVNIHNMLTSELEINETRFHDLEGALPDLSTESGQVMFNKKTHGKVMLMTLYYNIFGPEIYYKLFSLGALGEGDKDTFAAAALACGEKYYQVASSIRTLGYFDTTPGGGFHGMAMAQKNPQLDYQLFQKTNQNFKDLHLDWDNEAKDQFSANNKIPIFTMHCNIKKINPAAYMKDEKIANMDEKRMNVRFYSNLKFKLNDDDIYSPDNEKEKNKSEKTDNDPNEIDFELSRWQIVSEILCDQKITFQFLKDDNMDEVCQFVKNTIAWLGKKT

SEQ ID NO: 7189 - protein, 962 aa, Candida albicans
MRSSGYLNSNNGSSSSLESTNVNKSTDKNQLYLKVVCNCATDLVPQDTTGTGSESKKAYSSSKSINPVLVVQLNNTIKSTSKKLNTNQPSWNDELYMPLKNQDDSSLLIFSVWDKHTRYKNYLGELRLNVKDIFVDNGNFVDKTELKWYHLNSNTKYHSFVTGSILAGFELVIKNKKKRFHSSYNDKFQQLSIDSDVESAFKKWLSSLTKPTIYSVNNKINPNDQGFYDDELVNEFELESVLTERSKKSHLNVPGGNGLLSVPGDDCHDAGSFSDASFLSDGGYASDASANLFDQKETSSDSKKSRIKSKMRLRRSKQEYENFELASRQVLGVVFIEIVSCEDLPPYKNFTRTSFDMDPFVVVSFGKKTFRTGWKRHTLNPVFNERLAFELLPHESNFSIQFLVLDKDHFSFHDNVAHISLPLRTLTEYATAKPTEGDSSDVNTSDSTSFSQTGNGFTTEDTEFPENDSVQIIENETPSNKQSRKRYLSRKKVVGTQLDLKKFKAMSLSLQLHDQKYIGKYAPKLKIRVRFETYTELRKKFWRVLLEESNSTPENRDSCDYIELISLLDTLGCVNSDELVELFYSNLGKSSWGGDLLTFDEIIDQMETYVNQNVESGKVKIFEFEKCPICNEKRVSKKQDLDIITHFAICASKDWSVVGKLLSSSYVTPTQATKKWFTKALIKLTYGKYKLGGNSANILVQDRMTGIIVEEKMSVYVRLGIRLLYKGLDKARSKRVRILLKNMSIKQGKKFDAPQSKSDIASFIKFHKLDLDECEIDDPSQFATFNDFFYRKLKPGAREIEDEKNSKIVTSPADCRSVVFESIDKATQLWIKGAGFTIPKLIHNDHSMRVSSYTLGIFRLAPQDYHRFHSPVDGVIESIKHIDGEYYTVNPMAIRSELDVFGENVRTIVTIKTKDFGNIYFIAVGAMMVGSIVLTQRYRIRDFERRRIGLLQIWRVYCFIIN

SEQ ID NO: 7190 - protein, 359 aa, Candida albicans
MTITGKATTYSAPGSDLPNVLQQTTFVIDEAAIQPNDVVVKTLATPINPSDVAQIFGGYNDAVPSTRLGSDTTPQPLSVGGNEGVFKVIQIGSNVKNYEVGDVVIPKLPGFGTWRTHAVVDITQDSDLTPFIKVNDLTIDQAATISINPSTAYQLLHQFVKDWKSGDWIIQNAGNSQASKYLTQLAKLINVNVLSIVRDGKPQELYDELYELGATKVLSESEFLHPEFNIEDVTKGEGNVRLALNSIGGETVGGLVKGLSRNGVLATYGVLGGGKISYDGRIQLFKNISTRAYWLTANTKANPQSKVDTVEAVSKLFKEGKLKVAAYNKVKFDSTGDLKATILNTIGKSKSGKQVVIYE

SEQ ID NO: 7191 - protein, 217 aa, Candida albicans
MSKITSSGVRENVHKLLEYSTETKKRNFLETVELQVGLKNYDPQRDKRFSGTLKLPQVPRPNMTICIFGDAFDVDRAKSLGVDAMSVDDLKKLNKNKKLIKKLAKKYNAFIASEVLIKQIPRLLGPTLSKAGKFPTPVSHNDDLYSKVTDVKSTIKFQLKKVLCLAVAVGNVDMEEDVLVNQIMMAANFLVSLLKKNWQNVGSLVIKSTMGPSFRIY

SEQ ID NO: 7192 - protein, 924 aa, Candida albicans
MIKHVEIIHRVRYSTASTIAKKIQFSKLDEKWKAKWKSQSPTGSLHPTKHLIPETNEKFYSLAMFPYPSGVLHIGHLRVYTISDVVARYKRSKGFNVIHPMGWDAFGLPAENAAVERNINPSEWTETNIAKMKNQMETFLADFDWQREVNTSSPEYYKWTQKIFLMLFERGLAYRKAAEINWDPVDNTVLANEQVDAEGRSWRSGAIVEKRNLEQWFIGITKYAKELNRDLKNLPDWPEKVKTMQKNWIGESNGVEINIPVNFPGLEHVTVFTSRPDTLFSMQFVALALNHPIVEAAAREDQELAAFIESAKSIDDPTSKAGYMLKNIKASIPIDVDNNIKKSFDIPVFTAPYVLGNYGHGAVMGCPGHDERDFDFWKLNGPRGVPAIQIITPKKQNAKDDYPYTLKKGTLEDSSVLTHGLNDIGEYKGKTIEKATQMITDCLKSHSLGDYTTHFKIRDWLISRQRYWGAPIPIVHCHDCGPVAVPDKDLPVMLPGVKGKNFGKGNPLGNIEEFVNCKCPSCGKDARRETDTMDTFMDSSWYFFRYLDSKNENLPIGPEASKQMPVDLYVGGVEHAILHLLYSRFIAKFLSDCGLWDGEPHHKEPFKKLVTQGMVHGKTFSDPITGKFLIPDELDFTDPANPLIKTTGKTPVVTFEKMSKSKHNGADPGEFIERYGADVIRAHLLFSAPVSDTLNWQEEQISGTDRWLRRVIQLGDSITEIPKDQFKTEASGSSQTFQNVTLNKVHYDSIEFNSQELELYNTIQGYVQSIASSIEVKFSLNTIVSDLMKMTNTISEAIKTTNTYNQDLIFDSYQKLLICMSPVTPATAEECWERFALNQGKPAPKSIFYEKFPTDVPIESNLTMYNIFINGKHRGTMEAPKSFAKESETEIVKQISGAEKFNDLITGPVKKVIAKPSMISIVFK

SEQ ID NO: 7193 - protein, 509 aa, Candida albicans
MDQQEAPIYYGRSVNKVYNQEFIIDSRFKIVKELGHGAYGIVCSAKYDNGSKKVPDSNNGNASSSANASFVAIKKITNIFSKNILCKRALRELKLLQFFRGHKNITCLYDLDIIPNPMTGEFNEIYLYEELMECDMHQIIRSGQPLSDQHYQSFIYQVLCGLNFIHSADVLHRDLKPGNLLVNADCELKICDFGLARGFSENPDENAGFMTEYVATRWYRAPEIMLSFTNYTKAIDIWSVGCILAELLGGKPLFRGKDYVDQLNQILMILGTPPESTLQRIGSHRAQNYVRSLPITRKASYEELFPDANPLALDLLERMLTLDPRERITVRDALNHKYLELWHDPKEEIECQVKFDFKSFETVDGLDEMKQLIMDEVQKFREFVRKPIEEQQRIQMQLHMQKREEQRQEEEEKELLEQQRQFPAQESMDISQTPYNNLETNIGTPQVEDDYPRPQELDEFTFSNLESSSSMNLFQDMAKPSGEEYIKLEEELGFGLDGAMFNNYCNDHQ

SEQ ID NO: 7194 - protein, 663 aa, Candida albicans
MILESMGLHYLYYLVMIATKSLSDNYPSIPLRKERKGALNQWVQIVEDLIVLQATVAVAANFTQMVLPKTEKGKGIFKLKKPFKNEKPAEKYIDLYPIQMSSVAQLDNGQSVMSTNFDTYTLILQLGYILSTVDEWEINNYRVRVIVFVEFSNEVADEKERLAGLLSSLRIDAEIRVICLENANLDSYNYMIKGYTKSQSNKTQYDKVDRVLACDQWWKNLSKARETLREIEKRKTLGKQKLRIIPTRTDSNSSLLPETFQPLNLTSRSPQGVQVQGLKNNRRYTLSNLQEQGMSLSFNLRAANSTTGKDLLYADSIVDSSDSESEDSSSVATSNTTANLGYVSSRDNSYVNLASSQATLENTQRGDLPKVKNTLKEQNVYSRTHTPEILSSRSSVINLRPNFSSVKIPTAKINDEAEDGDDQEEDEEEEGAETDNVQGKEEDETNKETAEKGSILIKDKQSKTKDRSKQSIQFVADEPPKDLSVNPESSQSNQKGGKPKTKNLIVNDDEIIHHMETPQFLAAEDDDETDFLQMSLRDSKFPSCGPSSARSEVYKQKPTLSTNQSADSERTITRKQLQEELKNLTFNDIPAKGQHLVLNELMSRNSPSDKTHIIFSTLPAPSNGTHLNDTDSFDYTNNLAIWLDDLPPILLVNSQTVTVTTAL

SEQ ID NO: 7195 - protein, 924 aa, Candida albicans
MSFWPFTNSMNSNNALSKFLDSAQDLSSITAEDLIGDPTLSEELLNELHNIKGNYNSRNGVASFSFSQPQTINEATVSNSDSASFTSSSNDINTGNTKDSRGRKLLEILIQPHILSGLIEYVEKSVDFFYEQSIKENEKVLDLLNENPPETDIQEEEELKKIRQKNGIKSDDDDDDDIEDDENEEEESEDSKFRRCVQAAADILSIDLWIISNRIIETESLINKLWRIIDLNNLSESSPSVSYLVHILDQLMDANSIELLNFFRRQKNLVDTFLSKIEVPILMDFFFRLIQTDKQDSPTGIIDTIASQNIISKLIEILKPETSQFASQNCIPNHQLFFKQTAATDFLKALVNISSNAALASVVETNIGPNQLTRELVSPTVINTMINDIMLVKISDENGKTQTNKHGINNVVSIIIELIRKNNSDYDLNCGTYSSMLQNGDGGPIEVNSYVMYQWLKDFEQNPPGPRDPIYLGEMLDLFSSNLDRIAALIQTEPIPPPHVTSNILGFTRFKLSELIAELLHCSNMILLNSRKIKKIIQVRDQIRSQQEKRLQKALQEQISFSDSPNINQVTTGLDDVSLDDIHFASHSNDEVHDYGKLLDNLDQEEDSEDDEPSISPENPFVCSERDKSMRQDPCVGDYFKIKLLDSGILYDIISMFTKFPWNNFFHNVVFDLIQQIFNGKLNSYNSFLIVELFKEDQCNLTDIVVSSYKEDTNPRPGYMGHLILISEEIVKFTSLYKPDLISPVIVSAVQSEKWTWFINDVLLKTREIYNVVLGAEDSDGNNDYGFDTSSVGYLDMDQPKKIILGDASNHDEFINDNSGNQNNGGVSESEQEQTSNDLNDLGDDYDMNQFFVPDINVSKMSPSGDLTKHNIEDDCDDDLDEHHDDSSDKYLENLSDSSSEDEDEDEDIGETNKLKRVPTHNDD

SEQ ID NO: 7196 - protein, 362 aa, Candida albicans
MTLTTPELNFKAYTYKNSSTPVQLTDKSIKLVKDPSNPDSYVAPPGKILLKINYTSLNPVDVKLHHLATSLVSLLVNNNNGFGRDFSGEVLSIGDNVKTNVKVGDLVQGIYHKVYSQGTASQYLLVDPNEVDMIAKPDNISLAEASSWPTVFGTALLMSKDLKYKDSKVLVIGGGTSVGRYLVQLAKQGGAKEVVVTCSPRTEDVIKSLGADTIIDYTKHKNILYPVLESVKSTGKFDYILDSYGGHELFPEINNILTEKIGRYYSIVGDYPGSSFYNLISTVSKVAWRQLLGALGLLSFNYKFIMLDNFKESMQEARDLIGSGNLKIFVDSIYPFNQLDQAIEKLDSGKAAGKVVIEVAKE

SEQ ID NO: 7197 - protein, 223 aa, Candida albicans
MEIDAELLTQQASDSAHTDTATAAVAAVNNEQGKELEQTESSTNQTSALDKDDKETKDNLNPREETQSSHQEIDIPKDQLTNQQNLADQHQQYQYHQQLAQTNFKTEPTNSAKPPHGSEEWHRQRRENHKEVERKRRESINTGIRELARLIPTTDTNKAQILQRAVEYIKRLKENENNNIEKWTLEKLLTEQAVSELSASNEKLKHELESAYREIEQLKRGKK

SEQ ID NO: 7198 - protein, 1634 aa, Candida albicans
MSNVQSLIGDLNGLLTDSKRRFPDIRSSCEAAIKVLKSYSLVVPIQEINKEDHKEEILKPFILSCKSGNIKLTNISIPVIHKLILAHLIPESDITQVLLCLSEASNLAVDIQLRILQCLPALMQKYPITGTNLLDMLAICSSLTANNKSSMVVNTASATLQQLFTNIYDSIGESSNEKKKEHEVVIDNDETVKLDSLSHEGFLIFQDLCNFIDNESPTYLKDSIHIKLYSVLEIVESIVHGHQVLFQTHKELTYLLRVRLFPSMLKILNSVTKNFPLVNRTIRIMNVLLSTQLENLKIESEIVLSFFCHLLIDGGETEESESNWEKYMVLELLKNLFSDFSVLKLIFQQFDYNKSMKNVLKELFSVFMVYLQKSNTIVDDIVRPVSRLAPGTFSTDGSSSSGSALHGSNGNYLSRTTSNLKPSVLDHLDKLEPPGNIPSTYGIYLIYQILILFSDGVANFVYNLNDESKDPISLEADVELANALIEGCGVDVSLLYENFIYTSMDDDSFNILIKSFQKFTHATGLLGITATRDRLLVILAKAIIKNTSKNDTNEINSQSHSSGSMLQEQKKHLLAFGGSLVESISTSIAGEGSNETNQANTSSTSSTRSTPVAAPHSALTSRYFNSRHVVCLRVLVNTAISLKSTLQDSWNIIWIALQWCGYYLDGPDQFSPYFNNTKVQQTLKESKKPQISAQDVTNVENSIKKLYVSIGDSSVETFRTILITLTRLSDFALDVDNEKYEDELPISSFNKSYFVSRLAQVSEIDEFHNWLIKDEESWDIISSYFIDLGTKRNIHFSLRNYVVEMYMKVIETVAVFGFQHDDLIEETSQKTLNGLNGYLEKLFGMGSSKELLINNRETEIHLLILTTLHTLIDKYDKNYQQTWNEVFKLLNTPFRTVKKDEVEETINNDDTRSDEGVLLKDKTQLLVEKSFDTLKLILDEFLSTLPFNQFKLLIDTLSNFVYQQYDLNISFSSVSYFWLISDSLKSRMVSFKCETVSKSHDKQTEIHGDENKLLELISGEKIESYNFYIYLNIYLLLSLAKISKHEINRAQVRDGAIQTFYQIIDVHGNVLKNKSWDMIYDIVLLPNFFTIVPESRGKDWLDSLQLIFTGLISLYNKFGLNDDNGNGIVVKWQYLIDYFDKLLKLQWIDLNLKIFKSLQDLMTSYGGSKNINKQVGDLFFKIWSQFPIEYDLINNNYQESLVQYMQCFLPLYKITSKDLSISDMDLIINIFNKCGMYPVLPSNQSDNAKPTNLQNSILQNLKLLSNVDNNINLRPEFEPLVIQQLSNIIIYPYGIRNRIETKLQNNEIVKNKLPTFVAFSHLSLNLLNENLNNFDGVFSSIGNDNAIMKCLKSLLEIIENKSIGINNSGKEQSLSSLWIESDLIFVKIIKKLINHRDNNNLLTNDEFWKLIIQRIEISFIAYDEKNQEINITQYHELIELVLPELLKYENSQHMIEDLVIKLYENSYLYKFNDLEIRLMDQEKYTVDKTIDNLTLYKFDEFFGTTESIEKYPNLRIRLNCLEELINFSLGKDTNTDSQKIVLKQLCEKYLILRASFTFRRILNDIKLVYKCPIPIVQQKELLMILNGLNELSVKNNNNDDLKKLSRLLIQLIPYSSRINNLDKVLPQVLIKISS

SEQ ID NO: 7199 - protein, 459 aa, Candida albicans
MDKDVLTWKNIEINPSDIYPEFDGNLETVATVIDTSLFLCYFYCKPMLLGPLLRLPNNYCDSKIVNECLLSNIHNHVQQRNSKQPNFIKELLDFYYTRSLHEEALEMLYKLAHDEGTIEHSNEDDNKFDDFIKGPDLTIQYLRKLTDDNLYLVLKYSSWVIDQDKNAARPIFMNDSYECESYDNTKVLQFLCKKDQDLGIMYLEWLLFASDISESLKKSKLYSQLETKLCLLYLKQLKSGKHQNDYYNKLLEILKTSQTFEPWSILKEMPTTQDKFLRLTIYIYKKLGEHEKSIDVLFNQLNDLDAAMEYCLEIYNRQQSSSLGSSLFYKLLEDLLMNYHENCELIVRLLSEHGAKIPILKTLSVLPRSFPMHKLKTFFTIEIKNTDEQVKDSHLVSQLYKVGSTNLQYKVMTLQNEGYKIGSSKQPCAICNKRLGYSVFTITKDHEVVHYGCAQSRKK

SEQ ID NO: 7200 - protein, 413 aa, Candida albicans
MSNSNPLKDSLVFQPIKVGDNTLSNRIVYCPTTRFRAAKGNEEPTYRHVPSDLMLKYYSDRAQYPGTLLVTEATLISNRAGGYDGCPKISTQEETKAWKKIVDAVHSKGSFLSCQFWFLGRVGYPSLLKHRKLDYLAPSPIYENEKHQKQAEKAGLPLREVTEQEIHDIIYNDYTIAAKNAIAAGFDFIELHGAHGYFIDQFLHECSNQRTDKYGGSIENRCRFVLELIDHLITIVGAHRLAIRLSPWAEVQGIVEKESPIPTFSYLINELQKRADQGNQLAYLSVVEPRVQGTITADIKTMKGDNEFVAEIWKGVLLRAGNYTYDAPEFKGIVADTSNNRTLVGFSRFFISNPDLVSKLKNNPSSLVKYDRKLFYEQFNWGYNTYGQDQPVDEEKERKKFPKVIGNIDEARL

SEQ ID NO: 7201 - protein, 373 aa, Candida albicans
MTTPFVELQTPKNLDIISDVCFMDNTDQHRLLVSNWNSEILLFSCDSLLHEHQPPHLQPINTFTTPDIPLCLLYDNKQNVSPLVGLLDGSIRELDFENGKLGDNIGDAVDDNNEIDSGINNLKNVNISGQNSSSIVASSFNGKLQLIDTRQSQRQQQKLSPQTFHNQRKIFTMDTSDQYLILGLQNNIIEIYDFKNLHHPLETRQVGLKYQIKDLKTFPDNQGFALSTIDGRVSMEYFNPDPQFQLQNRFTFKCHRHPDPNPESAGDLVYPVNSLDFNHKYGTLFTAGSDGYVCLWDCKKRKRMRQYPRFLSAENEPESIVKLKINRQDNLMVVATSDDNYKRRRRLSESENSKTPSRVYVKQLAENECKPKS

SEQ ID NO: 7202 - protein, 426 aa, Candida albicans
MNKGTLLELGLLPIITSAFIWQIAAGLRLINVNFKLRIDRELFQTGQKLTSFIFSLIFAIGLIYSGYYDNAIRGYNPLQDGIPYGSYALILLQITAWSWIVTLLVEIFDKGYSFGSGILCFLAIQSSTNFIANLLGLENFPVVNSNKFESYGALMNLIKNFSIFNPKQTVYQIWHSFFRIQLPNLTQFYISLASILIVVALQNFRIELPIRSTKVRGMNNVFPIRLLYTGGLPVLFAFTVVANIQVVGYLIHSVLSKLGTSPIVISIIGNYVYNPSSNELDLNSGILNYFTSSSSLVESIISPIKTTVYSITIIVLAVWFANKWSYISGSSPKDISKQFKDQGISLAGKRDISITKELSRVIPVASVSGAFILSVVALIGDFFGGLGYGVASIIGVTASFAVLEEFMTEYQQNGGGQFSNALASFQ

SEQ ID NO: 7203 - protein, 377 aa, Candida albicans
MKTLFISTLSILLVSLLFTYKPLTTKLNLFTRFISMSHTTHPYQKELEVATLAVKRASLLTKQLSDSIVQTARSGTLTKDDKSPVTIGDFASQAIINHAIKLNFPSDEIVGEEDSQELQENSSLADQVLSLIIKIQQETSVYNDVVGTLTDKNKVFQSIDYGNSQGGSKGRFWALDPIDGTKGFLRGDQFAVCLALIEDGKVVLGVIGCPNLSENIVSNEEHSGVVGGLYSAVKGVGSFYSELFKEGTEPLSQQKPIKMQNHTNPSQLKVVEGVEKGHSSHSTQAEIKAKLGFDPTTVAKQTVNLDSQVKYCVLASGQADIYLRLPVSDTYREKIWDHAAGNILIYESGGQVGDVTGAPLNFGNGRTLNSKGVIAAK

SEQ ID NO: 7204 - protein, 888 aa, Candida albicans
MTFTINNTNSTVFDSTNNENMTISEPVQPVSKGPKGITFSGETFIVPETHDMVKTLFDPTVKKSNFELIILSCLFSNLLVFLISNNQIRIYIFIALYIFWRLSYNFGIGWLLQNQSNHNLLVSWSQKYHLFDPENKGALAQSIQNEIKSQRGENYDIKSMPVEFNTWLIFRKFVDLILMSDFITFCCVVFCSAIKDDYQFINNQSSWLVYSRIVLGSGLILFNLWVKVNAHNTIKDYAWYWGDFFFRQINNEELIFDGVFEMVPHPMYSVGYVGYYGFALIAKSYVVLAIAIFGHFLQMIFLHYIENPHIDKIYGPSKNEINLIKILKLKDLKNFDNLKPLVGLTNFNWMRASDIVNLVLSLTYGIIIPLFANSIKSLFILTVGMKLFESISINLSLTLQSYFKIVTKWSLSNDIPVEKSFSNWAVLYNSLINLTYSSLFGMNLGYFLQKSGSDSPSSGLLFSDWFYLRVFLGLLLIYTQFWINFSIIDSIGYFGWFYGDFFIPKSQSSIKNITTAGVYRYLNNPEQIFGVCGVMGIFLIYPTVENFVCVGLWVVNNFIRINFIEKSHMVKLYGEQEVNRDSGVTKTVKKHLLPEVIQRRMSNDEAYTRINGTTHGRRRRSSNLHRNSVADSLDNFIRDLRNSSTKLSQQKLIELSQNLSFANSDYKLTIDGLKMQSTESDELKYTTIGTPVTVSWTSPTENHSVRDWIGLYKIVQTSYSRNKTILSSAGRWTWCKEPKGSFIFDKEKLFWEEGVYEFRYHLDGKHDVAYISEPFEIKSIELKVPEFKEDAIKFAENLKLEIFDKVIKLTDISEAISPIANQSDNVIEVYKLISSMISKSTKINITYKIFLNQGDDDLLSIKDVAIKLINIKHVLEELSYNITDKKDV

SEQ ID NO: 7205 - protein, 633 aa, Candida albicans
MEEGEGLFVQSDEESDYDEPATKRVKIEEDSDLELNESDWEDVFLDNIADPAPSEFSITIQQNDIDHQRKERIKQLIREKQKRVSIHYLSMVSYIIHARFRNQLIRSKRVQKLLKKLIPDQVKKIYKKFKKNMDMQSADEQLVYILKYLIKWFRKNFKHDSNGLRVLGYSSDPGKFPNNAKNISNESDLLAVIKKFQHNRDTGAQIFTAILSALGFESRLVFSIPLLSIKNTNTQPKLNHEILKVNKDNDLLYPYFWTELINPLDPSEIIVMETQCFYEEDKRLLRIKRYGGTLSQSFTDQFYPIQNQLCQMSMHYVLSLNSENLIVDVSSRYMKDISYRWFNRLDLRTDLGKSALLLQSLLRIFNRMKNYTTDDYKELDSLMQMAMINYTIPETFTAMKNSPNFITPSTLRYNEVIMPDTKPVKRIKINNKKEPVYFKNSLLVGKSEQQWKFLGRSIKPDQAPIKLAKATPRTIYNKRLYNQNEINDPSLNQVKLYSFSQTCPYIKLKVTKTTDGKLILPRNKYGNIEIFRENMIPDDCVWLKLTNIENILKNKAQFVPVVTGFAFKAGQAIPVKQGVIVLKQDEIPIKKIWLAGRIKEHKAQLAQRRLKLLYTWRFIYKHLQIKKRLDDHL

SEQ ID NO: 7206 - protein, 639 aa, Candida albicans
MTTKSRNQPLSLNTNQSGTGAGTSTDSIPAGSHITDTNQSFLLPGLASPPTISNTAMFQNPAPHTIRKMDLSIEVPPHQLENNEQNTTPIDINMNMLKHYEILQLPTPIFNTGSFANYNQPLSSLSSNSSNASISMSPPTFRSISRVCSLKQPKRYVSEPIPISTSTSENKVTTSPITPSSSPPTLQQEEIAKKEKQKIFYSKRLGLSFNFVEEIGKGNFSHVVLAKTNIYNSDNNGNSVNNNTNDNQEVVDLAVAVKIISVPMESKQQVHNFKSFIRRELNILYHISHHPCITSLIDYDISLDIPIEQIESDVIIDDDELYQKTPPQNLSMNPHSDVGKSSSPDQFIFMNYCNGGNLLHFLQKNNSKHHYLHNHHHHHHHHNHQQGHHDTIQYWQFLKRIVCELIVTTAFLHKNLVIHRDLKLENILLLHDFDSLASLTSSIPFDKLLMSNAISNLSDFGLSKKLATQDQLLSTRCGSQDYIAPEILMGLKYNGKLTDTWSIGVIIYSILENRLPFDIPPPSSTTHYNSSTSPNRGSPTVIKRRRSKTNSTAYRIAMIDWEWSKLDNDNIERYQESVKEKENENDPIPSEVLVIWKQLKSVVDTVLVRKEKRINVEQMLQMDEFKWITDCLPDFIVNV

SEQ ID NO: 7207 - protein, 1208 aa, Candida albicans
MSFPRTHSPRPSGSREQEDLTSMIKAFRDSMEAKLDLHSQKLTALVANIPRTDEGFEDLSQRITVLKNHQKAFLPKQEKEIGSLLHRQREEEGDIKDFKTVVGEEKEELHQVEDCVLKDQEELRNVEKKVLKEEEDLQKVEESMEKEKRELHQVEDFILQRDETVKKLGESNQSQQEPYTTATSGSDQRFRSQQPNIGNTLAQDLALIPKLDSEICKIAVKYPKLFETKLRPPPPRDFQYKIQLTDHTQIYSKPYKCNQEEQALIKDFINEKLEAGVLVPAPIDAWLHPIFPIRKTNANQSSTKIAVDLRRLNKVTVRMYTYPTDTKDLLSSLTDSHYFSALDLKNAFYQVSIHKDSIKYFGISTSEGNYCFTTLPFGAINSPTIFTNFVRQILEGIPCIFIYMDDILIHTKTLHDHMSLLRRIMEKLNEHQLQMNYNKMQLLTTKINFLGYSIQANKISPDISKIQAIQNWELPTTTTQIRAFVNFSNHFRIFIPEIAKFTNPLNELLKNNNGKNIKIEHTQASIDGYKALKAAIIGLPTLQLYNPKLPTIIFTDASHMVVGGYLCQPTFRNDKEVLVPIAFSSHKLTETQSRYAAMEKELLAIIVILEKFRYHCSNTVEIYTDHQSLASFLDKKTTPPPRIARFLDLIGSFSPKVYYLSGKKNFVADIITRYQTQNIKELVDEDKILGQTFTVKRNLKQQLLPRLEAIELENLNESQVHKIQTSLEQQQQHDLEDNDEELPLQSFKLMNDELFVIINNQLLKYLPRSEYNDICQTIHDKHHPSTRVTDYLCTLAYWHPDHLLIATNITRKCHYCQLNTSIREAIRPYRPLEPLKAFSRWGMDYSGPYFNTVQHRYILVAVEYVTGLTIAVPTLHKDADNAISLLQSIISIMSAPTELVTDQGKEFSSQALATLCDQNNIQHHITSAHHPRGNGRVEKVNHLLKKILKALTNDTMQDWDLKLYDALRIYNATPTIFNYTPLYLALGIEPHHNLNQLQKDLIENLQKELPPEVQSTEEHEENPNDEQQEEGREQQISREEQQDGRDLVHLRIYELEAIKKARKLHTNLKTRRNAVQNMLKEPYGIPAPFTKGQWVYRIRAKARKYEPNFDGPYQVQEVLGKGAYKLRDITGREKGIYNQDQLKLAYSADNDPIQVFSSFNKEYDRVQQKLLDKIQSERDHQLNCLSVQHLHRQRRLLDISSCLEQISQ

SEQ ID NO: 7208 - protein, 555 aa, Candida albicans
MPRQQIKKQEVDEVAMQAAIDDIKSGKISSFRKASQKYGLCATTLRNRMNGVPSRSIAHANEQLFSPLQEDSIAQWILDSEREGTPRTRKDVIEFAGLIAAQEDKPTIHVSDNWFERFKKRHPEIHTVDKKLVSSQTMKSTSRKQAEKFFKNFKQLINENNINHDNVFRVDSTTYIMGKGNSSEMVIPGDDNKVYVQSFEGYDSCTVIEAVSMTGNVSPIGIVFSGADLKTKWINDGLPHWYYTATTSGSVSCQIMYSWLNEVFTPYLEQKKSEDEKCLLIMDKDYGTTNTRFQNSCESSGVVPLYLPPCCPHLLSPVDIQTLPRIVSPEYKSKLQELDKKFGFAPVKQRFFLSGYFKARQQLNMTPEEIVDRWAFTGMYPNNIRKVVSLSQDVVAKLKNGAEKTRKGERRRADANKSEENKTLSTNDSDDDEVISAEMTKSEIIERSQRNLERRKKQIDRLLVQVAELEFEKNRLRSEILLQQQLQQGNLTEAEVAKYLEDEDFLEKYASGELFVEKRNNLQDNNENHQQQSEGVLSDVTNITRKRKHSNVDDS

SEQ ID NO: 7209 - protein, 341 aa, Candida albicans
MSSSTTVFVSGASGFIAQTLVKQLIEKGYKVVGTVRSNEKGDSLKENLKAAKLQSENFTYEIVKDIAVKGAFDDALKKHPEVTVFLHTASPFHFNVTDIEKELLTPAVEGTNNALQAIKTHGPQIKRVVVTSSYAAVGRFADLADPSIPATEESWNPITWEQSLSNPLAGYVGSKKFAEKAAWDFVEKEKPNFTLSVINPVYVFGPQAFEIKNKSQLNTSSEIINGLLNSKPDSKFDNLTGYFIDVRDVAKAHIVAFEKDSIQGQRLILAESPFSTQSILDLIRKDFPQLDSQLPKGDPSQADAWKKAESKIENEKTRELLGFKFIDFKKSIDDSVAQIIG

SEQ ID NO: 7210 - protein, 900 aa, Candida albicans
MVIQKSPQTANIQLLEQQKENIQPLSGGRSATKLTKALSSRPNSATSINYQEHRTKLEREREELEQKLLDSDELDDPLQVYIEYINWVHYNFPQGANADSGLVILLEKCTSKFRDVSHYKNDPRYLKIWLEYTNYSDSPRDIYVYLAKKEIGNQLALYYEEFARYLEAQKKYTDANQIYELGIQSNAFPLKRLQKSYENFKERLQLEMSSVSTTSDLVREALKVKRGSSVEPGAHVDHGPIAKKPRLEVFKDDDDQNQSVLHLIFGASLNDDIKLNSTKQRIKENTISATAWKGRVLKQKVPTPPNSSGGKIQVFRDFEPLAFQAKKSICYDEKGRAYTLIENPGKKSERVLVNMDLIYPDESQEFSMLELLAISRRSERQKQQKQTLINHPTVVDEDTRTITLALNNSSTIKSRDMDPTITMNGNLAYNELQGIYNELGYGYNFDDEDEKVQEPTVTNYDGYVTETINPPTTNANLIPTQVDSPQIDQVATPPTDREEEFDDRVLSSPFVEQPVANTQPVDPFDIGLQESFLDNLSIPMSTYSGYYDKSTTKVDRIRKFREITNKNQTINRGSSSAIIDYCGQELYCLLHELGQGGYGFVYLIEAGSTGKLKALKIETPSSRWEFYILHQVHRRLIGEAGYKQRYFIRAEALYYFQDESFLILDYCSQSTLLDVVNNYKNKGSSLEECLVIFFTVELLKALEALHSVGILHGDLKADNCMVRFEPINESDWSERYDRSGKFGWSHKSITLIDFGRAVDMTLFSSGTRFVSSFKADEQDCPQMNEGTPWSYEADYYGLATIIHTLLFGSYIKIKKDGSKIKLHANFKRYWQHELWQDLFELLLNPYSSAEVNHAPRTESLATIREHFENWLESNSKMKYLKGLIKMVEGELNSINRARVN

SEQ ID NO: 7211 - protein, 751 aa, Candida albicans
MKLLPLSFSFLLFTCTFAKQLPVFDGKTYQSYSHSRNVYACRMHIHKTIKECSTTDIEDYGCMCTNKDAISTFIQCYAYFQKNSTQAIDFFVKYCDNYGNITTNIDQITDAYEDFLNNGSDTTTITNINNNNNTTNNTTSNHLDFDYSKYAYGLEASIDQFLTNWQRSFFYGMAMSSYWGFVLLFGTISNWTQYLFPGLMTDLTGPFSNWWRKNLSLPATFGTKKTQEYTFWFKYLQGYIPSRLESIINSGFCLVVIIVLSINTYYSVGNEIIFTNYVAQLRYLANRTGINSTILMPFLVLFAGRNNILQWITRWNYGVFMMFHRFIGRMIFLFVVLHAVTFSIALGVDYYPLMSFPFMIWGTISTVAGGIIMVQASLYVRRRWYEVFLGLHILLALFFMIGGWVHINYLGYEWWVFVAIGLWGIDRFVRVLRMISFGFPEADITLMSDETLKIKIPRPDYWEPIPGGHIFITFLRKDCFWQSHPFTFAPSVENSNTIVLYTKVKQGVTRKLYNYLVTCPGRRAKITVGVEGPYGECCAAGKSQTAVFIAGGNGVPGMFSEIYDLAKRSTPDSQKRLRLYWTIREYRSIHWLYEELNELKKFHNVEVTVFVTKPDSNTYINELSSRVISGKCNSTENFDGATTATTSLYEKVSFDDKATIVVTNRDITSKYDPNSVKDAIIAQLSHVHFREGRPKINTIIKEEIEDAQGSICFVTCGHPAMVDDIRAEVVGTIGKYKEKRIDYYEQLIGWA

SEQ ID NO: 7212 - protein, 704 aa, Candida albicans
MDSIFPSKVEYKQIDTFIALCDGLIYDTTVDEIKDVIAPDFPQEKLQEYVKTFTRPSQTPGFREAIYDTINSNTTNASRSFGILCNILGSRILAPTLTNSLTPIKDMTLKERETLLASWRDSPLAAKRRLFRAICALSGTTIVRLASELHLKAIHFPQRDLRETAYEGQVIDPFRYDFMEKPSFEGAEIYLPDIDVIIIGSGAGSGVVAHTLANDGYKTLVLEKGKYFSASELQFDDHTGVKQLYQGGGAVATLNQQMLILAGSTFGGGTTVNWSACIKTPFKVRKEWYDDFGVEFAATDSYDKDQDYVFKQMGASTDGITHSLANEVIMEGGKKLGYASKEINQNSGGHPHHPCGFCHLGCKYGIKQGSVVNWFRDAAANGSKFMEQVRVVKILNKNGIAYGVLCQDVATGVNFTITGPKKYVVSAGSLNTPTVLANSGFKNKNIGRNLTLHPVTTVFGDFGREVQADHFHNSIMTAVCTQVDDLDGRAHGAKIETILNAPFLQAAFLPWRGSNEFRRDLLRYNNMVAMLLITRDSTSGTVKGDPYRPDALYVDYTINKFDRNALLQALLITADMLYIEGAKRILSPQSWVPIFESNVPKDQRSIDDKDYVEWRKKVAGIPFDQYGAAYGSAHQMSSCRMSGKGPGYGAVDTNGKLYECSNVYVADASVLPTASGANPMISTMTVARHIGLGLAKDLKTKAKL

SEQ ID NO: 7213 - protein, 738 aa, Candida albicans
MKFFQLITFLLTFALIEASGRKPRKYSKLDTAMQACNVYIGKYGTVCASSGKKKSINWKCYCNQDPGFGTISDCLVRGYNNDTSIIDKFVDKCNMTESKFYKKYDRIQKEFKTNGTHYANKTSKTKTSSASKTSSTKASGTASVSSSTGKASSSTQKVSPTPLLINYKTFTPYKNAYAMSYNNYNISIYYGAGLLGYWAGIFVIAILANLFRKMFPRLTNYCTGAVSNAFRKYILLPATFGKKKAQPLSFGFGGFFDGLVPTRLESLIITVFVLLTGFLSALHIHHVKDNPQYATKNAELGHLIADRTGILSAFLIPLLILFGGRNNFLQWLTGWDFATFIMYHRWISRIDVLLIIVHAITFTVSDKATGKYNTRMKRDFMIWGVVATICAGFILFQAMLFFRRRCYEVFFCIHIVLVVFFVVGGFHHLDDQGYGDFMWAAIAVWVFDRAVRLGRIFFFGARKATVSIKGGETLKIEVPKPKYWKSIAGGHAFIQFLRPTVFLQSHPFTFTTTESEDKIVFYAKIKNGITENISKYLSRLPGNTATIRVLVEGPYGEPSGAGRNCKNVVFIAGGNGIPGIYSECVDLAKKSKNQSIKLVWIIRHWKSLSWFTEELEYLKKTSVQTTVYVTQPQDYNGMKSFEQDSNSEKKSDEKDSVESPQNSFVSKIKQDLSHVEFIEGRPNIVEQVEQEIKETDGALGFVTCGHPAMVDELRSAVTKNLNASKHRVEFHEQLQTWA

SEQ ID NO: 7214 - protein, 699 aa, Candida albicans
MDSPTYDPTTHLNKIFSSPDTLNELPQLLNHVSQYKRQLTEEINKSTAKYERVDLSEDISHLATSIGEIKRDSSMTKQSISQMTGSIQRLDCTKKNLVASMTLLKRLQMLVNVNNTLSSILPSHDYKEIYQLLGVLKELLQFFQPYKSIDEINQINLMVVHTQNKLIDDIFMDFEEYKNKDEEQLLFGARILELIDVKYKDKLLAWFYNLQLQDLQEIFSGEAGSLDNLNRRFIYFKNILKQVQQYKIFPWDISNAITQEFCQITRQDISKLLYNSKIESKTLLDNLTKTLEFEKSLGLHNEISSVFEPYLSIWVHEQDKYLNSKMLEFSAVPQLPPDVPNIAVSSTELFKIFNRLLSHITKLTNGDTIVDLARVFNKYLSEYNRRILAPILSTDDFGAESLKYFTMLLNTGDYIINNIEELADKIQKTTTHTIAPFNTDAFYQLINKSISSLLLKMSIDYKPCWREFFNLDWGQLDSVNDISSYMNDLKSKTAENLRVILPLIIRDSYVRNFNDKLVEMLVTTIANNLKFVKPMTATSVEQILMDVSSLKEDALRFPLFSVKDVSKSYQKFVNHQFGDLQSLLKLLMVPSIPVENLIESYFALIGDKSVSNFVKVLKLKGVDKAQHHKYVDNFKLQLSVDDGSVTSCLLLQNLEEEEEASRAATPDVKLNEKFDVSKINENFKNFGKFFRKDIGNESS

SEQ ID NO: 7215 - protein, 703 aa, Candida albicans
MSSNNSRLTPDRTSASSSTNNVSHNSSGKRRSLNTIESSVTRLLVSTKHLLESLTQWARKEADDKFVSDAYVKLGNDFRAAIRAFSNNGIDISDIGNVPQALRIILEAALSEAPSQENLDRFLPSIRNIIVTLLQTLKTKQAKAKAISQEKSTKEELPTENQRPSSLGVEGQQQQQQQQQQQQQRTGDNDSSVERSDALSQLQKGDVLQRRASKRFSAYQYAKLTNFNNPTTSVPKIKPMESPEVRHSKIMETEEPNVTPNKGVESVQEDGNTEEYVLLRINAKTKKAKVSLPVTFASLRLLFVEKFAYSPGAGNFPDIYIQDPRSGVSYELEEHLLPDVKSGTLLCLNETDDQNKSINELNLRLDDLTKKIDTMGSTIIAQVKDSVASVEIPVPTVAASASAVTAKSGNANEANKIGRKDITNLERDFRAIKQLHNSSSENFKETISNITEQLRKFQEIGLEVSQNSNRAYMESCNSKLSDDSDSLITKVDDLQDIMEEMRKDVAQRGVRVSDKQLKHILKDINLAKKSLHDMTLYISKERPVWKKIWEAELDKVCEEQQFLNLQDDLIQDLQDDIKKIEETYNLIEQCSIEQIKGASSKRNKIVANLYIPEPGESLHDLKDAVLNDIVGLTPNHESRLEAIERAEKLREKERDMMKLTKFQEELGDFVEDKKLKKSGGIEEIEKQRQLRDIENLKSSFGGI

SEQ ID NO: 7216 - protein, 874 aa, Candida albicans
MGDFPNLEPDKRIDQNSHSDTNSVNDQASSTNDSVLSTSPSRLVYIPGESSLTRDGPLPLDGEEGSSSQRGFITRSNRQQVDTSLQQVQYNNNKIALDSSINQTIDLISELQDENKERPIFYPTEIEDDASVVLNSAKAHLALVRKNSTLKSISKSKIETDEKELPEFKILKISLKSGHGDNSNTMANLDKKSIANLLEKKLLQQVKYLLNLKDRIDDTTSKVFVTGDLNAGKSTFCNALLRRKILPEDQQPCTAVFCEVIDASKENNSIEEVHAVPIGKEYNIRDESTFEVYPLESLEDLVYDCDRFSLLKIYVLDHRSFQESLLHNGVIDIKLIDAPGLNMDSYQTTQVFSRQEEIDLVVFVVSAENHFTLSAKEFIAAAANEKRYVFIVVNRFDHIKDKEKCKRRILDQIKSLSPDTYKNAKEFVHFVSSSEVLNENGGGDDGDPDDDDNNNNDNNDHPDFDQLEASLRKFLLEKRSISKLLPVKDYLLNILLDLQTLSKINEKIYYDEKVDKLQELNNRVAPKYNDIMTKSVRIGDTINGLIESTCTEVYNETNKEIVTTVNNLGDKPIVKYPGLQYLFEYAKETQLAMIDIVLESVARSEEVAKKVTSNRVDEIIKYGQQTLNEEFLNDKVFNSDLMFTRRRDTIGKSIDDTFEINDFFDPSIESFLVFVGLPEKFVKSAKYQISYFNPVGMLTSIPQNAVTLKEQLPSQLTLHTLYSSSKILTTGALVHKMYQFSHYVTPKMVKKIAIPVIIGISGITIYYLLSDIPNALPRNQARKIKKQIGDLDYAHQNSARISRECRQVLNYPARQVMNNFQTSIDKRSNEKAELEKVIKDAEISSGFFKNLLTKVERQQGLLKEIDLESINFVE

SEQ ID NO: 7217 - protein, 397 aa, Candida albicans
MLIISEFNPQLMHSDDSEDDYDHQSSHRNSSNGTTTFNQIITYKGQISSLNDALLIIEACRLQKLPMVTRRLTGIERNKFIKPNTVFVWNETQCGMKRWTDGRLWSASKVYNGNFLVYKQLNKKTKREQEEEESGGQALVKQSFSVVTKDHQRFHLISYYENVPGSFRPKSASNQTTTTVNIPSHDSKFNQLDLSNAIYPDSLLNSIYKRKHQQQQNKQHPQQQTEQLRQQSYSPAILPNSNNNPVSLESNPGAGISSNLYSLMNQTSTHYTPPSSSLSSSSLSSNSSNSSNSSNSSSGSINSQLTTQSSSPLSIPSLHIKSAGYFTSSGPNHNTFTLQKAGPQNRQQRANHPLTLQPLSKISQLSQTPTSGNNNNTGITNDYDSRTVSALNKTWLK

SEQ ID NO: 7218 - protein, 860 aa, Candida albicans
MSESPSQPPQKKHKPTTTGPSSSSSSKLTRAISACKRCRTKKIKCDQKFPQCGKCEVNGVECIGVDSVTGREIPRSYIVHLEERVKFLEEKLRLQDRSGFVDEGVSSTPPGSSTIKKKSNEISINEPLIKKESPLINTKLDSIAFSKIMSTAVRVQNRLSDPNIKPGNGNVNLGHNSTTTNENGIDINNDISRAVLPPKSTAMQFLRVFFHQCNSQLPLFHREEFLRDYFIPIYGEFDESISLASNNTKINKSFFNSSSSDGDKTPCWFDVYKSKIQQLLTENTQNDIQTIANNIIPPLKYRKPLYFLNLVFAVATSANHLRYPIHISESFRLAAMRFSQDVDNSIDPLEHLQGILLYAGYSIMRPTNPGVWYIMGEALRICVDLDLQNELKTKSKQNFNIDNFTRDKRRRIFWCCYSIDRQICFYLDRPFGIPDESINTPYPSSLDDSKIIPNDNSTDYYYYKNHHHHHHHDDDNDDNEDDINFSYKNVSLLFFKIRKIQSQVTKILYTNAEIPREYKDLNHWKQSILIQLTQWKQELQSKLISKQLNCDFNEIFFQLNYHHTLLYIHGLSPKNYKLSLIDYENLTNSSIQVINCYTELLKTKSINYTWAGVHNLFMAGTSYLYALYNSKEIRLINSIDQVQKITNDCLLVLQSLIGRCDAANYCCEIFHNLTMIIINLKYAPKDKKHLTELKPANSIPSSSFSSSSSFSSSSSTSSSKISRESLYRINNGNVHSNLFHLVTELDHLNPLTKTKTINNNNSDHFDITNDEKQDHDSTIITDDLSSPPIDSSLLPLNQQTILQWNDEELQNFLNELNQSNQSNQSSPNNNSSIRDEKKTFELIHDMPNEIIWDEFFANKQ

SEQ ID NO: 7219 - protein, 996 aa, Candida albicans
MSNTIPQYFIRIFNLIFSARRKNFQLALISGLLFFGSFAILSTTSYSKKFNYFDDLILKIYDYNYLTNNYNIDYLAKNDPEAYFNVKVQQIVDEKKQHDLESKFWSLDTKINDDQATLQIPAYFTYNKPRDNKNLEDSEQSSKPVEKPLIQPFDPRFTLAMYYYYLDQQMTTAHHDSSSSSSENSITVPFNWYDWVDMSVLSKYLLAPNKDKPDCSILDAHEDARKIETEKKKMEKLAKQWDENKRKAEEEKKKAEEDKKKEEEEKKKAEEEEKQRHEQEKQALEEDKKKLEEEKKKIEEEKNKLQEQQQQQQEEKANDGNQKHSKFVKRDDEIKMSTSQDKSDSDSDRAKIDMTTFFNEAFEKLSDEDKASVAKDVEDAVKKITQPSSWCVPNAKLSIDHSDKQIVHPGFNVFKSPGRTTPQKAIIAGKSFLYSYAPPPSSILFLTSEGSYSVNVQHSAPLLRNGIPESYLANNNFDVSLNVLQQLHKLKKNHKPDTAKVINDYLLHIPKESFKYDPDSIIFDYTKRLDKGEKLTIKELKYLQSLEYSKDKVAHGGPPKYFAESRLIGTTVGDHYDWRFFNGVQFGTVDQSLTLHRLIRTWLSFTRKSGITTWIAHGSLLSWYWNGMAFPWDNDIDVQVPIMDLHKLSLQFNQTIVVEDPEDGFGRYFLDIGSFITLREKGNGNNNIDARFIDIDTGLYIDITALALSNSETPKSDLAELPKNFEIKDNNYKPANELLQIYNCRNNHFNSYDELSPLMKSSVEGEIGYIPSRYSTILTREYRSGLSSNSHGGYIFIAKLRLWVKEEDLYYFIKHRDQWTKYHSFNTKLSQDPSNTLLQDYSYLMSEQEYENLQYSTDLEHDNPFKKTKKPLELKNSELEKLKHMNESELLQFLNNDDILIQFFNAKEFTSFHESEIMQLTFGKSTAKLMSSAIDFPPIKYEPYLYKLNHDLDTFENKVDRYLALQDAYQQEHNNSPSGGSDNGFMEIEEDLDFAF

SEQ ID NO: 7220 - protein, 182 aa, Candida albicans
MPAYHSTFLAEEQNQSINSGIRTIGNLSLLPFHTNFRGPIYSENNSDYDIIEEVLDLFRANSFFKNFEIKGNSDRLLIYGILFINQCLTKLTKFTNSKEATKILINLSVDNFHLPGDIGFPLNSLYVSPANKSEYELLKNYLTQFRQELSDRLIKRIYHDDPNIPSKHWLAFTKRKFMNKSL

SEQ ID NO: 7221 - protein, 371 aa, Candida albicans
MNRSSYSSQSDNRYSRNPAVLCSFYSKIGACRHGEKCSKKHLKPISSRTILLANLYQNPTLNDDDYGHANGIGSETSQIIDNESVIKNSDTVGTVSQIDDSPHSNSGEVTKDETVETQEVETENSENIAETGDVKIDHNEDQKQIEDVKESDKVESSEEVQQDDKLHKEDTLEKESEDNIKQDENIEDAKLEDTEKDKLPEFTISQSQKDFDQFFQDIFVHISKLGQIRDIAVCENENNHLAGNVYVMFESAEDAYNANLQLNQEWFNGKPVYSDLSPVNDFNDACCEEYRDYHDCQRGAMCNYMHVRLPSSDIEESLYESQAKSYMLKQLEELKKELPGDIRSSSSTNDDETNGNENGISSTMAVLEQLS

SEQ ID NO: 7222 - protein, 522 aa, Candida albicans
MSKLVRSIKNVAGGYSSAQRVVRNATSNDPTGPTTFDMEEISSFTYQSQTEFMEVMDMLDRRLNDKGKNWRHVAKSLTVLDYLVRYGSDKCVLWAKDNLYIIKTLREFVHFDETNNDQGAIIRVKAKELVSLLRDDERLKQERANAKKNKRYRSYDDDDGDGGDDFDSDRRRRNRDERPRRDEPYDAELQRALELSRITAEEEQNRNREEENDPELEAAIKLSLEEEEMRKQNNNLLDLNDETPPQQPQYYLATGFYQQQPQFYAQQPQSQQFQQYDMFGNPIQNPMDTGLYNQQAYYQQQQQQQQQQQFQPNQFTGFNYGQPQQPQAQPEPLQPLKTGSNNPFAMSSGSDNTNKPPTQSLNSLAEQQQQQQQQQPQFFTQPTTAPLKQQNTSSSRFNETHELNDLLTQGTGLDTFGNTGDTRIPHQHTKTQNFINSSGTGYKQTGNEPIRLSSNATGNPFLNTGIGYQGATQQQVPQQQVPQINPAYTGYGFGNAQPQQHQQYQQQQQSRNGNDGPSLIDI

SEQ ID NO: 7223 - protein, 1126 aa, Candida albicans
MVLNDFDLKTEALNERTTLHTSQNASSKNGSNKESVLAKYEETNQNDEIEGFENLNDLSFSKYSKFSKASIIVGSDPKSRTTTLDSPFAKKLKEDLNVEFTSDNTKPYYPTVYPIYEFDNNDENSDSPFLDYQNEKGNIPQKLSGQKLRKQQQQQQQQSEAEENFKQSNQYARLQSTPKHQRTSSVKVSLTPAQKFEKRTSTRSHNALDNFELTTLVGNGAFASVYRAVNLKTNQVIAIKQIRIEKDQDVGVLMGEIDLLKILKHRNIVKYHGFVKTATSLNVLLEYCEGGSLRQLYKKLKKGLPEYQIINYVRQILEGLNYLHEQGVVHRDVKAANVLLTDKGDVKLADFGVATKVTSQHLTVVGTPNWMAPETVLGGEGICTASDIWSLGATIIELFTTNPPYHDLNAMATLHAIGTDEHPPLPKNMSTLAKDFLLECFQKQANLRISAKLLLKHKWLNQTATAKTSMATLLRQPSRELRSIKIYSESNDENWDEDFEEIKVSKFQNSTSSIIELKPDNTEKQFKLTEYSKKDLLTLFADEKEDTSGNFEFETIGPNKLAVVAESMDESDPFLNIDIENFDTNELEVQSKMEYLVVRLSRKLEQVHLGYEDAVPALVKVTGRMLHLVKKYPVSHDTLIRDHGVLSLLELLESFQDIPSQQQLWYHCLSILNHVFESDLGTLENFCFLGGIPTVAHFRSATYEVQVRLQVAKFIGILNLSEKALSMFVSCGGLRLVSKFVEEDFDTTPTFPLIAIESIHNILAKDLSRSKSDLCRILSKHGVIFWLVVLLNRLVKYDQKPSIKNVSKEQVEITIERIIDIIKYFSQSETKVRISIGSIDLFKLIFKLFDNLKLSHQLTLLKFVKSMSCISEVLKNLYHAEILEFLVKLLKSYIPSKGNYKEIINVLAPILYNSLALNHRRESEFVNLGGLPYLKTLSIINLPFRQFILPIICEFVHCDASVVNELKKNDIVKIYYNLLLDPYWQSNALDSLHCWYKLEPSYIDLNSPMAVDCLVGGFLLPKVSNLESTLEIYFKLLTNNLPLTRDMSNMNVINSILIKLSLHDKKNPVIQLSYLKVLKCLINYLVDSKSSLPFAKPVVNTLQSLKSRQSSLLIEEVTTELLSVLK

SEQ ID NO: 7224 - protein, 1387 aa, Candida albicans
MNISSMLSSDNNVSLKESTSTATDQQQQQQAESVDHATINGNGQTSVSAVNNVQENHLSEFHSSNQQHSSIPPVGTTVEHATTTTTTATNHQPVNSSPLKHSVDENSNPTTISSLKKDTNSIIASILPESYQFDNSYTPTIDQKYKSVFESNINVINQLDQYQQMGHHLKLMKFDEVKLNNYLINTGQFASNYIDRVVAEDISSRNNKISETNKNKELIAIDYSKPLHHNSTRGKEFKWGSTRKIHKVEHKSRRRKPAATTSTTDDSNKAVAAAANGTKDHSATAGTTASANGSDTPDRRHQRQSSKPSTPILIKPKTEPGKGSPEIQPRRSSRPKVKRKAFEDELETADKQSSTQQVKKSQESTGRDHKRVKIENKQEEQQQHQQQQQADEEDEAEAEAEAEQKPKSGALSEAAAAGMTAKEFKAFMRQYDNTYIAIWKDLSRKDGPKGSRSMQQATQGRLINLRKTALLAAREAKRWQLKNTKNQKDLTTKARRAMREMFNFWKRNERLERDLKKKHEKELLDKAKKEEEEREAKRQSRKLNFLITQTELYSHFIGKKIKTDELEGTNADDNLKSNTKEHLDKYADVDGSATHDINAVDFDNDDEEALRRMAAQNAQNALIEVQNKAKQFDNSEESFKNPDTNGEEMNFQNPTLLGDITIPQPNMLKCTLKEYQLKGLNWLANLYEQGINGILADEMGLGKTVQSISVLAYLAETYNMWGPFLVVTPASTLHNWQQEITKFVPEFKVLPYWGNAKDRKILRKFWDRKSLRYDKDSPFHVLVTSYQLIVADIAYFQKMKWQYMILDEAQAIKSSSSSRWKSLLNLTCRNRLLLTGTPIQNSMQELWALLHFIMPSIFDSHDEFSDWFAKDIESHAQSNTSLDEQQLRRLHMILKPFMLRRIKKNVQSELGDKVEIDVYCDLTTRQKKLYQQLRSQISMSDTDLLELESNSTSSDSSLANLVMQFRKVCNHPDLFERADVNSPFSFGKFAETGSFLRETNELDVNYSTENIVQYDLPRLIYDELLTPNYNKSTRDSIYSKFSIYNPENMNATGWLQGINVSPNELKHYSQKDILSRAIEMQNKPTETEKLERINYLYEGDYIPKNKKLLITDHSTSTNSSFISNSLVFSDLVSIKEKVSQDMYLNKLEPAVTPIASAPPITVNCSSMNFTNKMNNTLFDSNIRSSLIPLSLSTELKLMKDQIPLEQYPKSNMLPMPIFDYSNIRMPSMDRFIAESGKLAKLDELLIDLKRGGHRILIYFQMTRMMQIFEEYLAYKSYKYIRLDGSTTIESRREMVQAWQTNPEIFIFMLSTRAGGLGLNLTSADTVIFYDSDWNPTIDSQAMDRAHRIGQTKQVKVFRLVTRNTIEQKILERAKEKEEIQKLVVGNM

SEQ ID NO: 7225 - protein, 507 aa, Candida albicans
MAKNPRIQIYQCMFNFLFFFFTLLLLFCCSILTKLNFFFFIFRFNKFTPKKHSDRVLIKRVLYTLVFLLVTYTIYSRVLTGDSRIPQSQDRQQSPTNDNNHEVYKVTKDGVYKQEVTGVVEEVEEEELKEVTTEDLYKSNVDIFDLNDYQGSQEGAKNGDILLFLMPLRNAEHVLPMAFYNLMNLTYDHRLIDIAFLVSDCSPDDTTLETVFEYSVALQNGTLVDKLKHEEELKNSGNVRGTSDLYQSYMEPSYIESVKKAYSNPESHHPNYRTPFRSVTIFKKDFGQVIGQGFSDRHAVKVQGIRRKLMGRARNWLTSAALKPYHSWVYWRDADIETCPGDVIEELMSHNYDVMVPNVWRPLPTFLGNEQPYDLNSWVESDAGLELAKTLNEDDVIVEGYAEYPTWRAHLAYIRDANGDPREVIDLDGVGGVSILARAKIFRQGVHFPAFTFLNHAETEAFGKMAKKMGFSVGGLPHYTIWHIYEPSEDDLKEIARLERKKRRQKS

SEQ ID NO: 7226 - protein, 427 aa, Candida albicans
MSIVLPSGTTDGFKAVSKYSAPVRRPIEPVGRYFLAHASRTLRGHTWSEFEKLEAEKNVKQIEVNEDEDLGDEEQSEELLEHDPREWKTANLYAVLGLSHLRSKATEDQIRRAHRKQVLKHHPDKKSASGGLENDGFFKIIQKAFEVMLDPVKRRQYDSIDVENDPKPPAPKSKYDFFEAWGPVFESEARFSTKQPVPLLGNLESTKEEVDAFYSFWGRFDSWKTFEFKDEDVPDDTANRDHKRYIERKNIANRKKLKQEDNKRIIELVERAHAEDPRIKLFKEKAKKEKAAKKWEKESGSRKAAEEAAAKKAAEEAAAKKAAEEAAALKANSKKAKEAAKAAKKKNKRNIRAAVKDNNYFGDSAKSADIDADVDLLIEKFDDVKLGEVADKVKDADAASVKSTFVEVAKELVGAGSLDASYLKYFN

SEQ ID NO: 7227 - protein, 515 aa, Candida albicans
MNTSTTITPNESNPQEYGPQPIELTTSNSKDDQHNVNNNDNCLNENNHSIITRSITRSTTTISHQSSSLHLLDDPSKFPDGWNNRAMITLFGSFLGMIGSLGYVNSGGVIQSYISTNILINDSQSSIGWIFSIYNFFAFGGILISGIIFDKFGCKIPIFVGVIIMFSGLLATSFCHSLYQFILAYSILAGLGTAFVFGPFVACLSHYFLHKRALVIGISYTGGGLGGVIYPLMCRSLFSKIGYGWTMRIGAFISLFCCGIGWLLVSDRHEEFSPDLEKKKKKINQEITTTSSNNSVIDRVENEFISIIKEIFHSIDFKILYKNLLFTVLVFGLLFNGIVFLISIVQLPSYAISHGFSEQQSYLLLVVFNSFSIPGRIIPSYFADQGLGRFNTFCLINCFSLIAFVVIWLPFGNHLTALFIFAGCFGFSSGSVLSLTASLVASIVKTSDVGKGLGTAFFILSIADLFGIPIAGAIASGSKQSYNNLVYFLTACAAIGAIVSFISRYLYGGFNLNRV

SEQ ID NO: 7228 - protein, 163 aa, Candida albicans
MSETLGDEYYPSFAPFLGFAGCAAAMILSCAGAAIGTAKSGIGIAGIGTFKPELIMKSLIPVVMSGILSVYGLVVSVLIAGGLSPQENYSLFNGCMHLACGLAVGFACLASGYAIGIVGDEGVRQFMHQPRLFVGIVLILIFAEVLGLYGMIIALILNTKGSG

SEQ ID NO: 7229 - protein, 2016 aa, Candida albicans
MSFKELLIEIGPENLLPEKLLPSLLQIKPNEIDQGIALILAEILIPGSQGLSQGLTFASSLPGSNAKGAQLQACFKSIENSGKFNVNWYEVFNHVHQYLFDSSQRDIQPSVGSITQFLSSLDFKQEPIDIFLNYEWWFNKTLLYILHSSDASQGGYDISLSPNLAYCFEEDKTTPQTRRNILKFINVGKLEIQVITKIQQQQQQQQQQQQQQHQLSEQDKKLNAFLNQLFEHDYRVFPEYILAAALTVVEKSQFINDLIDTLFYLLVDSASPSLPKVVRLLKESGLAAIKLADYYKSRKTIDAADKVLTLASSFGLTQEILDIFWAFDSKIAIKILVESSLFGYDYKSVIDSKLKDPQVKTSIYQALCEALDERAQKDYERGQQVQQAQQLQQQQALPPHQVLKIPTVYYLLEKIKSSNGVVDAKTLRNLQLLLLTTYPRLINFGNGHDEAILANEEKSPFFPPSVEMEMKAYYSKMYNKELEIKEIVDMLTQMKASDDLHSQDVFACMIHSLLDEYKFFSEYPLSALASTSLLFGALLEKDLIQGTTLTVALNFIWESCNQPQDSHLFKFAVQSLYNFKSRLHEYPIYCKHLLECRSLSAHAKMYQIVKDAANGIPCTTGAAPTQTNTPDVGPKYQSINYVDRTIGYATQEEPPESIRDKLLFSVNNMTGENLRLSEIQEVLTESYFAWFSDYLVSDRAKAEPNNHELYSKLVKSLANPIFFEYILNVSLKEVDYIIRNFKDSRSERNQLKNLGAWLGRITLANDKPLRRDYIALKFLLVEAYDFNSLPLILPFVCKILDQAQYSKVFKPPNPWVVGVMKVLAELYECADLKLQLKFEIEVLLNSFNMKIKDIEQSTIIRNHNPEPTALARMFGISSQSVNLANEMTRLSLEGSQLGNNIQAPFPQQIIESKQFPGISQPQMQNVLQQQQQQQQQQQQQQLPPQQQLPGQLPPQQQAEPALDTSFSTLIGNSIFTQHANLRRAFQASLSRAVRECTPHICNKVVETVVTTTKALITKDFATERDIEKFRNSYQKLALSLSHAMVSCNGRKALVETIEATMLQLLGNNPNEVPLAELNSAIQANVGLCVDIVDVLVGESILDIIEARMQTEVFLREHHTATAPNEPFIAEGASDYSLRLPNPLGLALTGLSAQQLKIYEHFGEARVDQIVPPPGSTGITQQQTQSLAPLQQQQQQQQQQQPVSTVVAAAPAPAPPQQQQQSKERIAQAQGVPDDIVSFEQLFTAITANCDKAVQLVSEVTETKLADLPPNHSIMAALTQALVIAQTNAIKYPELLLKAAQYAVNCLFTQTHENPMSNEIYVVILDKLCEYSPSTAKDVIWWLVHSSDQRKFNMPVMLSLLKVQLIQPIKLDLSIGKLIKETNNPVVVKFAASLLTNIFTSEEMRPIALRSEFANTLDALSKYQANDQSEEDRQAKEATSTLFKLLSEAAPASNQLFAQLGYIFAEWVRLLTHGDDATNELQIEFVKGLIQSGILNNPEYVKTFFKAAIEISITSFATEHELRSRTQHETYFAVDTLAMLIVRIVLLVEDSKQAIDYLKKVLGIIILNLINDHETSKANWNERAYFRFFSSLLSTWCDASVLDEEVTVNLDVKFYNYLGELFNALQPIVLPGFTFAWISLISHRMYLPKLLELPERKGYATLVKLLSSALKFQQIYGNNKQSSRRQQELEQEQEQEQKDEKDAKDAKEQNQEQEQEQENSQQGPEVINVTYKAINRIFIGILHDFPEFLVECHYQLVTSIPRGYIQLRNIVLSATPKDIHVPDPFTQGLKVERLPEINESPVVFYKPIEDLSKVGLKKPVENFLRIPAPGLMRTIYNGLKLNQPKEVNELGYEETINFNIKLINALVLHVGISSVADRLPNNRGFNTKSSQVALLVDLMNYGNTEFKYHLINAIANQLRYPNSHTHWFIGIILHFFSNNNIWNSNGNKLVVQEIITRVLLERRISNKPHPWGLTILFTELVKNGDYGFFELPFVKDSVEEVKNIFNVLSINVKGSTP

SEQ ID NO: 7230 - protein, 245 aa, Candida albicans
MVVDTLIYHPTLSKLIKFWDSTPKREKTFRLLSYLSRFLGYYAYKKGYSKETIELWSNLKAHFTFIRKAMRFFKPINHLQLASKAFDNKLMDPILQFTTIIRNLGYAGYLTIDAIVFFKLLGIIDKKKYPNLGKYASRFWLLGLIAGLINSLRIIYSLNSYENDQKNTQDEKVKETETETETETKADTVAINQKLYQAKRKLIWDLLDTFIALNSLDILHFTEGDVGLAGVITSLLGLQDLWKAT

SEQ ID NO: 7231 - protein, 378 aa, Candida albicans
MLRHLVFILIAILLLTFPPKIESLFKSFIINKPTKTTCYQYTTREQLKSILESDTHETNFCIEKPSISPPKTNSTLLMLCRNSDVFSVLETIQNIQDRFNDKYNYDYTFLNDVPFNYEFIYLVSSIIPHGKINFGLIPIEHWSYPSHINISLATEIRQNYANVPYGDSESYRHMCRFYSGFFYKHELVKQYQYYWRIEPGIKIYCDIDYDVFEYMIINDKKYGFVISLFEYSETIPTLWNHVVQYINDNEIKSELLPLLTNKYNWYNLCHFWSNFEIANLDIFNNDDYENFFQYLDNLGGFYYERWGDAPIHSIAIALFLQKKDIHWFENIGYYHVPYLQCPQDIDLYVKNKCTCNPDEDFTWSDLSCTNHFLNILHN

SEQ ID NO: 7232 - protein, 450 aa, Candida albicans
MRKTLTSIRFLSDGIRVKDKWNSLISDLVVEPTNSTGPLSGTTYIVKDNIATSHGYTTAASKILSNYESPFNAMIIDLLSSNGSKLIGKSNLDEFGMGSANYNSYFNKVTNPYDNTKVPGGSSGGSAASVAGKMCSFSIGTDTGGSVRLPASYCNVFGFKPTYGRISRWGVIPYAQTLDTVGIIGENVNIIKRVYDVLNKYDDKDPTCLPEEVRQKIPTTKKETLTIGVPHEFVLKELSADVRESWEYALSKICKLGHLVKPISIKTIKKALPSYYTLATAEAASNLSRYDGIRYGYNTNESVNSPIELIATNRSNGFGSEVQRRILLGNYTLSSDSGDHYLRATQIREELCAEFSSIFNNSHVLLQDEQSSDKVDLIMAPTSTSTAPTWDEFVSANEKNFLNSYVNDVLTVPASLAGIPAISVPVNGIGIQLMGQFGDDDLVLQLADQI

SEQ ID NO: 7233 - protein, 838 aa, Candida albicans
MSISSTASTSTTTFYPTSNRTSIDTTATSINNDYVNTNKPTRLSTTSSLFTIDSELNDLYPELPSNFKLIELLGEGAFSSVYKAIDISKNNMIVAIKIINKINLNSKQLQNIINEINILKQINYHHHPNIIELLGVIDGINQTFLILEYCDGGEIFDQILKYTYLSEPLSYHVFKQILNALQYLHNTLNIVHRDLKPENLLFNKIPFFKRGINDNNLEKYLRKSDDINEKIDEGEFKYGIGGGTIGVIKLADFGLAKQLNDKNIAQTPCGTTGYTAPEVFQCRNNNNNNNNNNNNNNSNNSNKSSGGSGSGSGSIYHQLFKSSKSKVKTKSKQLSITNYSKSVDIWSLGCVLYTLLCGFPPFYNDDIEILTNNVINGKFEFLKPWWDEISNDAKDLVSKMLIIDPNERITIDEIWNHPWILKHMNNESKQRQQKQEEEEEEVPGYFPNHNKNTNIINQTIFENVHEDIITPINKEKEEDDDDYSLSLAPPPSSQQILSKSPRAIAIKKVFDNPAMTTNKSIKNKASICHGDNNDDDIYFANQEEEKEPLSFFIEDIAELDEEDEEIESEVTNDSDDSDSDSDEDVNVNVNEINEHLKIMGDLPFKTRKNHHDYIKTPYPKLISFKDVFNLNKINSPQEDNEEEEEEEEDLKNQFHRFKLSPQNLNSLNKSNVIDNLHKNSINNNDSDDTTSTTTTNSSILSNTPTYTTTNNNNNNNNSIDNYGRSLLRTSNNDNQLIDNHDEHDDTTTTNIPNHETRSSSIISGLNGDFKFTLNLTNSNLLTRRKNSNNIISPITSSSSSTTSSSNIINPIKSIKPTTSNIGDATTTIINTNATATII

SEQ ID NO: 7234 - protein, 175 aa, Candida albicans
MFRRSLLSTSRFINKSSSSLSPGLLLNNFRGNFQQSRFISTELKDALDKAVTTSPVVLFMKGTPEFPQCGFSRATIQILGQQGVDPEKFAAYNVLEDSELREGIKEYSSWPTIPQLYVNGEFIGGCDIITSMAQNGELAELLEESNALIPEENEPTTSEENQETVQSANIKPNRN

SEQ ID NO: 7235 - protein, 669 aa, Candida albicans
MSAMNYPDFLNSSNQNGGSPAMSKGNDPRSQDTRESKQQDLYPSGNNYISNVATNKDYPPQQQQQQQQQFNNLLLKKLSALDDASPLDVSSFYTNASLNKDSFNLPAELQGGVSNISSRRPSYAAESFTRNNFYHQPSLNPQSPQLGAQSSNFFNNRKDLSSIAMFNNYANNHYQHNGDGNFDINDSFSNLNLNAKFNDFQSRRPSQLVDFSFSPFGDTRQQQQQQQQQSQSQSQSQSQSHVPNQNLQQSQPHLTNAGNSAPFIAYQNKQTMNSAQNQSMGQGNPIKLENGLMLRDQYIVASPELKSLYMKTIKYFQDQSITADILSKLNNLLTNPVIIKLITFIKNLNNLTFNHKILCLVINKNGKFDLLSYPHNSNIFLQKNDLVIVDGDRGKDLVMIVEPLVNLNFAILFNFLKKLEHLKSLTIIEGHVTKTNGGTHPTTMDASTIINSHSNEDNEFIITLPTKQVLRFATPKEVHKISGKFLEEKKAFITCYNKIKELNLDSDLSLINVEYQCDFKKLIFYYFAGFKRIDFRGLIKELFKIYKTRIWLCAVLPYNKPELYITMDKEDSEPKVVQVNNNLVPREYELTNDQILNFSINEFDNLATPSYFHSKNVQNLIKHMTNEIKGHFYGFNTGKIEGNYQPVKTVDLSDRSRILPNFNPFGDFQ

SEQ ID NO: 7236 - protein, 470 aa, Candida albicans
MNINSTFIPDKPGDIIISYSIPGLDQPIQIPFHSLDSFQTDQAKIALVMGITIGSCSMTLIFLISIMYKTNKLTNLKLKLKLKYILQWINQKIFTKKRNDNKQQQQQQQQQIESSSYNNTTTTTSGSYKLFLFYLNSLILLIGIIRSGCYLNYNLGPLNSLSFVFTGWYDGSSFISSDVTNGFKCILYALVEISLGFQVYVMFKTSNLKIWGIMASLLSIGLGLIVVAFQINLTILSHIRFSRAISTNRSEEESSSSLSSDSVGYVINSIWMDLPTILFSISINIMTILLIGKLIIAIRTRRYLGLKQFDSFHILLIGFSQTLIIPSIILVVHYFYLSQNKDSLLQQISLLLIILMLPLSSLWAQTANNTHNINSSPSLSFISRHHSSDSSRSGGSNTIVSNGGSNGGGGGGGNFPVSGIDAQLPPDIEKILHEDNNYKLLNSNNESVNDGDIIINDEGMITKQITIKRV

SEQ ID NO: 7237 - protein, 351 aa, Candida albicans
MRILTKARAFNPHLAEMFSNKIPYYYSRAHMADPEACQKILDKLDLKSKYDGSKLDIVDVNPGYGLFSTMLNYELKPRNHILIENKERCVTSLSSIINKLVEETGHNSNFTLYKKDSFIWETYNDLIDKDKLIQPQIKSFDTPHDELLILANWTGNKEESVLAQWIKCCGHRNWLMKYGKVRMVIFAPSVSAMKFLGEPGFKKRRRTGLKRDLYTDSRLIGVVNSEKAPGLGYDARVLVRDQPVLLEPSSAHRDEDYSVIEISPGKYTASQIENIEHFLSAIYLTNKKLVDILPTLAPGAMYMAKDLPEEMLQKSSYEFTCEDIIKLSEAYENWPFKPSVADLYDFDITFS

SEQ ID NO: 7238 - protein, 274 aa, Candida albicans
MSQFGEFYDTYSVENNQQYDTDLNNSTNTPIVQSKQRNDNIIPSINIKQEDFDSVLSGSLDVKKQLSSSLNTAGVGIGSSYGNGGISKPQSRRNSTYIKSHEGSDNEDEDDQNDKDVGNERKRRDNINDKIQELLTLIPSEFFQSNTDNNTKTGTKVVKENSPEDDAVKNSGTKDGKPNKGQILTKSVEYLQYLQNLIDENNRKEVELIMRLKTLELKAANRPSENIPIRIGYTSAEKALGEIGVGPCSEEYFKNVLIKSASTSKSGRRGSTSG

SEQ ID NO: 7239 - protein, 1100 aa, Candida albicans
MSSPSILSKNIEDKSSTTEIAPPPTQPQSQPVTTTTTTTRRSKTFTGCFTCRSRKIKCDLTKPQCEKCTRAGLICAGYDIKLRWSDPIQYIQTKTGNVKSQPIKFTNKDDEQLDENNNNSKNNNNSSSEFFQRRKVGFVKWDEPYETYEDMDSDLSILHGSGEDPIVKLSGETKLKGPFGVFKGEPSPQQQNNIISQEISLKSKKRRLNNSHNDTNVIATTTTTTTTTGTTSNVSNTYTNGSSPLVHGHNFTTTTTTESNSQPHGYNLETGIPHSDQPQDSQWISNELKDAALVTAAALDTQFLDLMFNFNSNIPTDDTSNNINNNTTTNTHTHTDNQTNNNNNNTGHSSIMDEFNNPDFLNLLFHKNSQLAITTPQPHIGTTTHTTTPQLSHSNSSISLANILNQNQGANNNSNSILMDPTYYSNFSNFFYNNPYQSNENLEIDLHAKSIDHDHDHDHDEDEDDESPEEVDGNDSKLLQFIMKIVKNPTNLPFDLSLPSNSNEQQQQQQQQQQQEHHHHHQIGIPVNALQVQPLTRYLLNYYVTNVADLMTVIPLTESPWKTIYFPRALMALGELSALGKTSTAKNALLNALLAVSAFNLQSKFPKNSEPMRFYLNLGIALRNQASLFIKQLLHNKRNNKRNKTNGIEYCINHEKYKDVLCAVLSMISVDLVWGTMQDTRIYITWCGKVIIAKMQNKKKLSTKASILHRIFSNLKLIQDSTCLDIDSINEDFETNYYGIGIGTGTGIGYDVSGDKYVQQKLDNSDGDATTTTTAVVDDHKKVRKTRIDFIVNNTFTNKKQTKTTTTTTTNKSKSSITTSPSFVNKKLINTMKNDESFATDALYGLPYSLIVLFSETVELLRTKIYYRDNPKAAARIAMKLSNHEKEFNDRIEELNEKLENWTLDWQLYEQQQQQQQNMTTTKAKTRSTTPTSSPTPTDGKPENEEPTTVGDDNDNDDNNEFDHKFYSPMHKATYHHIMSFYHALMIYFNRLIKQIPAENLQNQVKKTLQHLNAIQKLIDDKEANIIPLFWQGFIAGCEAIEPDLQLAFKQWGADIAKYLGSYWGARQIMMEVWRRKRANEIKDDWISVIHDWEMNLMLA

SEQ ID NO: 7240 - protein, 689 aa, Candida albicans
MSTSKRAYSRGGCKECKRRKIRCPEDKPSCATCVRLGKVCSYPLPGERVPRVSIRALANKEIPLNDSPEPKAKKSNPKPLTIQMYSVDDFGAKKKKRRLRLDDDYLTNNFNTETNSPISGNNNGYLSNSKSANNNNNNGSNTTDNLMQQINSQMIPPIKPALSITQASESMLSTTSSSSLLGGLYNDDDLNLLASDLNNIVNDIMFTSNMPNTNDSLIDDNFFSPFNYPPQLSDLNDIPKHIPLDYIKLKTDDEKRYLAEFYHEFASQILPFGAFDKISGTYYNPVRDVILIYAAKEPFLLSAILSQGAKLSFQKTSKQSDHDNYGSYLSRCLRLLGPALSKNRDKSVKDDLTSNIESILITVLLLTSSNAMTEKLSWRPHLKGAKDIIIKATHSKIRSSKTLILCKIWFADFEILAGTSSHLGGTIKTDCDLDSVINFEDEFVKSVLEQFGLLQGGSFNIMSGYNIQMIYLFRDLSKLLNRKREMGEQFVPNQSLEYIRLISGFYEHYGKVYIDRKCLLPGPISTPLTELYNLVDSVPTTSGNTLYISWMDISQQAYALAGLITVFTSILLDPPDLPHIQDLNSKLVDLIKFVEQSVNSFTMKFPNGFSMIQWPITVAGINCTIKSQQPVIGKFFKICIELGSVSAEITLKRIKKIWELREKGEEYYDLHIKHENGEIDGIHIDNVAY

SEQ ID NO: 7241 - protein, 381 aa, Candida albicans
MSGTLPFIEDSTGEKFKRQKYKEQSFVESKERGSRDTKEHTPTTALSYDEVNDDLDELVALRGEGRYFGVTDPDDESGISRQSLGPLCANCYKRGHTRAKCTVVICHKCGAIDDHYESQCPTTIICSRCGEKGHIVSQCKSKIRKRQYCRTCDSFKHGDENCPSIWRSYITKSPSQGENEESSVLPRIYCYNCASNEHFGDECDKPRSSRIPNFGSAFSGNNLPKKYRNLYFKRLRAASNSRIGDEEYRPTTSTRDYTSNFTPSSRYEGFGSQGFSRNGGDHPSRSGFFPKRQSSGFGSSNGFSRTPKGPSQDNRSKGKFNSNAYGSKSSYNQPTRTGMINQNGSQDQRGIYRNSTRGGPQPTRSGLIANRKSKNFKKMKY

SEQ ID NO: 7242 - protein, 597 aa, Candida albicans
MTTPLSSYSTTVTNHHPTFSFESLNSISSNNSTRNNQSNSVNSLLYFNSSGSSMVSSSSDAAPTSISTTTTSTTSMTDASANADNQQVYTITKEDSINDINQKEQNSFSIQPNQTPTMLPTSSYTLQRPPGLHEYTSSISSISSTSSNSTSTPVSPALINYSPKHSRKPNSLNLNRNMKNLSLNLHDSTNGYTSPLPKSTNSNQSRGNFIMDSPSKKSTPVNRIGNNNGNDYINATLLQTPSITQTPTMPPPLSLAQGPPSSVGSESVYKFPPISNACLNYSAGDSDSEVESMSMKQSAKNTIIPPMAPPFALQSKSSPLSTPPRLHSPLGVDRGLPISMSPIQSSLNQKFNNIALQTPLNSSFSINNDEATNFNNKNNKNNNNNSTATTTITNTILSTPQNVRYNSKKFHPPEELQESTSINAYPNGPKNVLNNLIYLYSDPVQGKIDINKFDLVINVAKECDNMSLQYMNQVPNQREYVYIPWSHNSNISKDLFQITNKIDQFFTNGRKILIHCQCGVSRSACVVVAFYMKKFQLGVNEAYELLKNGDQKYIDACDRICPNMNLIFELMEFGDKLNNNEISTQQLLMNSPPTINL

SEQ ID NO: 7243 - protein, 768 aa, Candida albicans
MTLGFDKFISKVSTHRRQSEPSILEIAATNSQNKSRRLSMDNGHCYVRESTNNHHHLNTVVDNLRQRAGSFSFISHHHNHHQNSHDNYTVDPLTSNGARISRSRSRSKSVGHGEAISPAYFSKNKTKDLVKQETAHIISKKLLNMLQDLDLQNPIALKTISQGSESKFCKIYVSNTNNCIYLPAASSTSFTYEDDENGGVIIAEDRNDEMPTAVNNNTLSMDSINHSETDFSDSPPPPDLFSKMKSFHSPNYLTSKIDSECPIPHTFAVIVELTKDSLIIKDLHFQFQSLTTILWPTGDAYNRTHAKEKFAIGNMEWRTSLSDADYYINSSNSNDVKSKNLGPEDLINRTREYKLIDIEEPNNSSNSLSDDDMDINNITSPLSTSPTSSSTSTNSTSNSLGSDSYKAGLYVFLLPILLPEHIPASIVSINGSLAHTLSVECNKYTDKLNRKSKVSASYNLPMVRTPPNIGNSIADKPPYVNRIWNDTVHYIITFPRKYVTLGCEHMINVKLSPMVKDVVIKRIKFNVLERITYVSKNLSREYDYDSEDPYCIHPVSKENKVRERVVSLYELKTKAKQSSGGHLEAYKQEVMKCPENNLLFSCYEVENDNNNGNGNKNVKQKNKDQPMIATPLDINVSLPFLTTMSDSLIMTSAIEEEGSDSPHTSRRGSAVSMTDNNTTPSINNNPLFPFLGAVETNGASINEIGDHTLFPDSNFRHIEIKHRLQVTFRISKPDSDNKMHHYEVVIDTPIVLLSSKCQEDSPPPYSSV

SEQ ID NO: 7244 - protein, 584 aa, Candida albicans
MSVAITSNNNKQPQPQPQPHLKVVNNNSTFNLYTWLRSVFQYCISLIISYTSNWLLVNNDNNNNNININYKSNNNDNNNASTSLQPKISNVKAESMKIFPDLQKSNFTTYYTTEKPLHQDVLKPVICSTGITSRILPYTNEKGELEWKFTEVQGKELDEFKMHPQQQQQQQEVKQELSPAESNESNESLAKDSSTTPASISDSPSHSETESTVSSTIIANSNQIFKCPSCDAEFRVRGYLTRHMKKHSTKKAYTCPFHDKSIYVDENNITHKCHSSGGFSRRDTYKTHLKSRHFNYAKPIKSAERSKVPGQCAMCGEHFNSAEIWCEIHVEGGECKFLPMGFKGKSRIKNRLKKQIQKNKMIDPELVPFASKVLEEVEQERQKKKNYRTTGTGSESSIQSQESESSINSTPLSMQISAPVPMPVSIQQQHQHQHQHHHHVQNQHQQHVNQQQSIATPASIYSSSASSTSSYESTHSPYTPQSSRSPLSHMYNPQQPPYFNQIAQAHQQDGQKNQVKDDYDDEYCLDVDQLNTTFVNETVANYLQIHDFHSMNQYQPGQQQQQQQQQQQQQQQRQHQQQQPSMYF

SEQ ID NO: 7245 - protein, 133 aa, Candida albicans
MLFSFFIGGNFRTWTPTPPERGSFPLDHDGECKEYMTKYLTCMKFTENKNAPNCRILAKQYLKCRMDNQLMEKSDWDSLGLVNLPGENDVELDHHHHLNNNNTKADGKSGSSNSNQNLANTTNNNTGTSSGTK

SEQ ID NO: 7246 - protein, 371 aa, Candida albicans
MAKRKATESEPLPTKKPTKSVSETTISICIPSTVISSKNAYNLQQITNIIYQIAKACTIYKVAEIIVFDVPQSNNDKEDDKSTVVVGSKVKFVEDEPEKTLANPSKKSNVNGDKVSPSLLVASLLQFFITPPYLVKTMFSSHLNSKFKNILPKFTYAFKLPKITTLPFMQNNQVYKDFKEGMIIPRETPLMKKKNKKTKSDHKITVSKYVNIGEKEALKLNIKREIPIYSRVTVDLKNKTVVSPLQAYGVVGHKAAFGYHVRMASEFNKIFTQSPISDGYSSTIYVNCDDYFGNNNKISELDNLSTFKEATGNVLMVLGNYKDLQAGFKADTSNVFENIDSVAHLFDSKLNIPDGCRIEDAILISLAKVIE

SEQ ID NO: 7247 - protein, 328 aa, Candida albicans
MSEDDEYIKALEIQRRNFEAQFGSIEDMGFEDKSKTQVELEDEDERSSQDSPDQSSGEDEEDSKFDEIDSDSNEEEMDFLGDDEEQDDIPKPKVFKLNDSSNTPLPVVSKQDRKLLKSGRAPTLLEISKKEKLAAKQQSKQQSAKSKAEDEENLANDLKLQRLLKESHILANTLEYSGADLTLQTIDFDDPTGKARRRALDSRIRELASTNSRTGGLPKKLEKMPMAMRKGMIKKRDERIKKYEQDARDAGIVLSKVRKGELRDLDAGRGSTSSSDRLGTGKKIDKRIRDRGLKINGIGRSTRNGLVISQGEIDRVNRGGKKGFRKRR

SEQ ID NO: 7248 - protein, 1146 aa, Candida albicans
MLRLQEVHIRKCYGSKIILKHNLHISSTLLYNKPSIPSSRRSRSKQKFTSKSKYDDSFFKNIFQENKDNKSKSIETQSQDTHQEVKTSGLEKIQNLVKSKVKSRSIFDSYANLRIDITKPNDELVRSIIKNTKTMNKKRFTDPATSWLSNFSQKEIQELQDFLNNDLPINGTINGKTMETPVKIGDLVTLGSESLRLYLVTSVPKTFNSRICTFLSDRGEIMFAPFSTIGYRFSGLIPDKYHKNIEKFVVLEQKYLNIPPIGIPDAVFSKSNSALPKELQDRENGTKKVVTEEKEEVVDVDGNGDPDESAYLDPNDFIVQQASSQLLSNTDVQTFIVPTTVRQIYVPALLQISNEAFWKMGPMYRKLEELHRSLQVDDNNGEFNTPRTVSIFEILSKLKQPTSEQSTSTIKLGKSPTNSIDYDQRQYKISDVMAVLSLLKKQSHLWTILPCKSSFTPTKVTIWPLAQTKEEERTVEYLNNDDGLTDITKYCGQVALGQKPANTKPIFYNNGEKMLRGYVNGEYKDDASISTTLVSLLRKVDKYFVELGIPLKEEAYKNEYSYGKAYDLLTKLNNDVVVNPLLWSEQANLPTEENASANTLTKQKFYNYMDQELANETPNEILQNTIANEIYNEDPLQHLRQDMREIPIYCIDDPTAHEIDDGISIHEDQQDYIVSIHVAEPSSYIKPNSIISSLAFEKTSTSYMPDTAFPLLPKLVSDIAGLGIPDKDTRTFVIQYRVDKKTVDEYISNKVNDKNYKVDQSLLDQIISQINESSNIVFATVSNFRQGFTYDKVNEVLNDEIKINQYKSMGQSNDLDFNNLIKLQYISSLLWEIRKSNHAYTNSGNTKLMVKKNNTSNTNCDTEFIYDANELQMKLANSNNTVSIGFANLESASIKLVTENMIIANYLTARFATTNNIKILYRYLDPKFNDELLSEYQKLMKLSDTNNNTSIPTDQLTQMFPFFTRGLVTDKPQKHLLMGLSMYSNITSPLRRYIDLVNQWKIQDFFLGKQQQQQQQSRIDDKNIPAIASYLNGQGEIIRNIQSRANTFWQGLFLRNYQDLKNNYNHNHNHNPIDFKLKLITNPTMGPTVGVYIPNFRFINAHVEVSSEMLEDFKSGQLKIGGLIDSNKLHLKQVDFLENEVIFEYK

SEQ ID NO: 7249 - protein, 462 aa, Candida albicans
MTSKSSSWKALLKNWEFKVAAFIGIYFLISHVVLETTDVVNEKGLKSHLKVLPEEVIDYYGKQPFSNVDKYAYMQYATNYDYLNLAIINFIHLRKANTKIPNLVIIYDEVLHYYASDKWSELYQVANQYKITLKAAPLIKASYQDDSNWAASFTKFHIFNQVEYDRIVFFDSDSMLVDIPNEIDFDNMESRFNHIDELFKIPQELSFASPQAYWLNNVVEGKSPRPRKNVEIPNKKRYSLRMKKLVNDLSIYQDFNLLPSLIYENHYFDNANHFFANHIMVITPSKNTFQELMRYIHNPWWWSITNRGSLRKPNDYDMEILNKYLNNELQRKRINVGILPHRVYGVLTGEFGEEWHERFVVEPQYLPFINKKSNKGWSPLEFFKKIKVVHFSDSPIPKPWEEENNEEHYNIKKIYCDKGDMEKFHKDYPVYKPRLTDDCDSVSIWNWFREQFYKERSGYWFA

SEQ ID NO: 7250 - protein, 143 aa, Candida albicans
MVLPIIVGLGATIVALTAKATITAYKQYLHLTPAMIATLNNIKLINLESSMSINKSDPRYAHYKYLRSKYPNRPFLDPMTEQEALLILGIEGNDILNLDKKMIRDRYRKLMILNHPDKNGSQYISQRINEAKDILDKSYMVNK

SEQ ID NO: 7251 - protein, 201 aa, Candida albicans
MAGKKKSKSEALPLDLDNIKPMDHLQPVPKTRSSSITSIESADEPGTMKQVLLPPTIKEFDELEQFESFVRDETWDNDFDYFHGRLHYYPPFVMKSCQNNLEKIKPTMNKNSKKFRRDLQHHIQKHLIKDLEKCCGYELNFGKGEVVETDNKVTWKFKDETDHGFSKEEEDMYDRHWRLELDVSCTNESAMVDVEYKSIPM

SEQ ID NO: 7252 - protein, 698 aa, Candida albicans
MKDINATENNLASKFQRFNDKTLENLINQISKIYSSNNLLVLDAVLSPLINSLTNFTKLKELGKFQNIVWLDNELVSIGSSVLAKYASLIVVVPTSSLENINILNKLIHSQPDLHSLKLNIIVKDLKMSFMYQINKVFNGIVNFESILSPEKYQKPISVTSRIKIYNWKTSPIYTDEILVTEINKFNGIDDYFSKPLKQVNQLSEALMQLLFMGIQNGKHDHLFKLRNIYGKGNHSKLLIDQLQNSKIPEFMNENMTTLEIDFYSDVLHSNTDLVVLERNLDFTSCIFNQLNYHGIIDDMFSIKFENIEQLSSNEISKSLANDKLYSQDLKHLNFSSIGLRLNKLAKYIQQQFKTSSAQKNSSSSEPNISDIKQLVSNLGTLSIQQELVKKHTIIGEEVMEKINKNYEQFLTFQNDIFEMDYKSQVAKLREFVNCNYPIEFVLSAILLIGYLNDGISNKEIDWLSLEMQDNYGLEAVFTLEKLIKFKMIRVIHGSSVDFFSSLGFTSQKKKPTTHSQSEFEDDKNVGISGSGDVFRNNYTLINKFWNLHPLDDDESLSQNLTESGSNESTNLLDLYSNPSFTLPGNTVPLIYRFVEALYFRDFLKHKPINNLKRRPNWDNLGVNTMFAGKTIDLNLDNVNDDRSKYLVIVVIGGVTRSELTCFKYLQERFRKQGKTKEIIIVSNGIVNSSKLMQFMSN

SEQ ID NO: 7253 - protein, 176 aa, Candida albicans
MGRYSVKRYKTKRRTRDLDLIYNDLSSPESINKLKNQPLDELKPGLGQYYCIQCAKYFENQISLDRHTKSKIHKRRVKSLNERPYTPLEAEAAAGVNMEKFIASVEKYKQLENDKQENKHEYDKLINQKKDNLDAIITGIPSEEFQQQQQQQQQEELQDANQRTVSNDQEEVMMID

SEQ ID NO: 7254 - protein, 331 aa, Candida albicans
MATLKKKDKKASACFTSSTTTPLNYSNPVRLAFLGGPKSGKTSTISKLTAGNFRDTYYPTHQIHPILFNYKPSNEASKVLTEFVKGNEDTILSPMLNSNELVPTNEYYKVGNNDVGPILVELIDTPSFNPQQVVPFLEASLYTNLDKEILGNLANEPRKPVSTNPLLVASGASELNGNINGYFFVYSAVPGSSPPGYDEDLSNFTGDNTFSLLPVIKGALEDAWQEYNEYIRKKNAEKEQDLFSFKVALRNLLKEPSSNNSDKKGVETKDYSPPIWILCTHKDSNLASPKLIEQGKQLAREWNCGFLAMDNSEDNIDILLTLMIRDIIERK

SEQ ID NO: 7255 - protein, 291 aa, Candida albicans
MNKFSIITRPLFRSSRHIGVFVPIQRFFSTTSPRLSNLLGEVTKIDSEPPITTTSKSTTTSSSEDNKDISKVTPENDEELIEYHAKNAESKQFKIEKYIHPLKLQLYNENVSQFGFFKNGQIMNHNGKKLRFTLTPQEIDILEPSIYLTSYRIKSSMKKATIVNRMVRKFNVKLAINQLHFNHKKISTELEQLLKRGLEQAKQLELNEDELYIDRIWIGSDGKWRKRLDPKGRGRMGIIAHRYVHLKCILKTNQTKLRLDWEKQQKELKSKPRMFLNDEPLNLKVRPWYKW

SEQ ID NO: 7256 - protein, 563 aa, Candida albicans
MSTTFRYFAASDFHQPLGSNKNNVFERNNSTVSSTNSLMSNNSDTNTAATAATSGSTTNNVKRMHSSLISKYNSNRSTIFTNDTDSISSSMSYDNNSTLASSVSPNSPANHHSSKHQHQLPSYMMNKSPQYIHQSTSRHSNLNNTNNLLHNTHSNHSQHSQHQHILNEDLVTLNSSMDNLEDGFYKLIRLDTRISFESYYVEQKQEQYKVKLQLNKHQIDLLRYTWNQMLLEESNEDEIFDDGGIDNYDLDEEGNIEENINVYYANNDSIPGAFPTGYNNSRRRIIKRKSSRNVNGSGSTNTNTMTRLDSTTIASSLFCRQLYFNLLSKDPTLEKMFPSIKHQAANMAGILSLTISQLENLSILDEYLAKLGKLHSRVLNIEEAHFKLMGEAFVQTFQERFGSKFTKELENLWIKLYLYIANTLLQTGIDPVLKLTRYESNGSFTTSTNIDLTNGDSILLDDTDTDNDNVSVSNILDPKHQQQQYGGSSFNQDDNDNNNDGGVHPSTNTVVLTKSNISIIESVAPHHQQQKNSSGSSAATPTAPSKKSKFSIRKKKKENCVVM

SEQ ID NO: 7257 - protein, 127 aa, Candida albicans
MVQSMTSVVKAANFILARPTLSKIITPLAQKFTAYAGYREMGLKFNDLLLEETPIMQTAIKRLPSELNYSRNFRILTAHQLALSHQLLPAEKAVKPEEDDNYLIPYILEAEKEAFEKAELDNIEVKA

SEQ ID NO: 7258 - protein, 310 aa, Candida albicans
MSIYSRSVSLVRCYSSAQTAMKKPFQGPLFLNPHAWKGLPADQVFELHKIRKEYMGDAYNPTDEERTAILSTISSLVPNKPPLDYAFEIENFKERLMNNTPMQDRGKPQKLSNQYVINSGAVPHQRRRIEQLTRKIAYEAPLLAKYRQPYTPRPRTEAPIRLTYNSDFTDDTSSAHNRKVALKVSLRDLNLNPKQQHKFKVLAGDKFNHDEDTFQLKSERYPEAAQNVNWLVDTFNKLLTEAKDLSKDDYSDIPLSKSHMKILAKKAVPSFPEHWKKPEDAPIKRHDIVKKLVAATEKAKDNEYIRKISP

SEQ ID NO: 7259 - protein, 260 aa, Candida albicans
MIFSRYFIPIILTLLTSSPLFVDADPNMEELEGTWSSKSNTVFTGPGFYDPVEELLIEPDLPGICYSFTKDGHYEEALYRVKPNPKNHSCAVASVTYQHGKYELLSNGSLVLTPIAVDGRQLLSDPCNSEDPSKSTYTRYVQSTWFKTYQVYVDSYHGRWTLQIYQFDGSKMQPLYLAYKPPVMLPTIALNPTDEASETASTLGSVSHKIKRSRMRIKRSLENQYRTNAKREIYTEKFDKIWWSSVFCLALASSYFFLKR

SEQ ID NO: 7260 - protein, 283 aa, Candida albicans
MRGSTFHKVIRTYSTTPASTSSSISSTLVLSRLPIITPDVPKFDQQFYNYQTELWRRLMWTFPKWFYFRPGTLSEQKFKELNENPVSYDPKVIYPRGKPDLKHNRDRRFRQYIRLPKTYKEESELVEGEENTQSDQDIARKIVPNSRITEADKKNDSTSLERKLSRTLYLVVKQSESDGEWKFPNFKQPENGDLVPLHELAETGLYSIGGKKINYFNVSRVPCHVIQDSKDSSKQYFIKSHILSGAFEAQEKDVEFKWLTKEELGECLSAEYYKDIEHLLNDV

SEQ ID NO: 7261 - protein, 629 aa, Candida albicans
MFSRSILLRSVRKSLGRYYSSQAHPQTYIYNLLSDTKCRSCGIQLQDKFPDKPGYYRLPGQNDSNTDKKAKTSELNKKYEKILQNLDISDRNLLINNFSAPKQDDEKVASVPSLQQITPVEADTRDTTKDQQTHSGHSLSCKRCNDVIYNSKTRSIYDPNRDNLNKSEFPIPKLQQVLSTIPVDAPLVYVFSANDFPMGINKDIFQYRPPQQIYFVMTKSDILIPKTNVAFYNNFKKFLQNYMFKKFNVPRENVFIASGKDRWKMTDLYHFIPNYSYIIGDTNCGKSTLVKSLLINHHVKHWKYEALQQRPDEKQSSSASLKNKDFKKLDRLIDSFSSKNGPGTSHIPGFTRDVVPVDIDGIKELFDVPGFTTNENLQDIFDKLNHKQIARITKGANTSKYGSLKSKFDTVKNGQVLSLNGVGYLQFPGQDSMYQIRNVTKFALHKFKNLEKVDSILQRNEIPKSMSSHFIVNRQQQQQQRNELRGYYKRYIIPPFYGTIDLVIKDIGYINIKPTGKKLTNELMVLYLHPSLEAIIRQPILNYIDSPTPKKSPDGTNRKTITSDISKTPFYSRLIPSTVLSDPSSLVLSPPSSDYNQLNQYLQIDESSESAYNDLLELDETNKYDYWIE

SEQ ID NO: 7262 - protein, 335 aa, Candida albicans
MMMHLQQTPTKRSILPPITPLTNSNNGSKLSLPPLSSILPTAPSSHYRDHPLTTSTPYKAPLPSINTSAAYQSPSMTYGSYIPTPESATSSVTSSNKRSFSVLDDSSIMDTSILEERKLKASTSSSVASTSSSSPTLSSPASTPTDNKAYAFISHSLATFPSQEPSIDNAPLARRKRRRTSPHELNILNQEFALGTTPNKSRRIQIAKKVSMTEKAVQIWFQNKRQSIRKQSNSEKEITVLPPTSNYPPFQQHQPEQISTLPPPPPAQVQPVQPVQSVQLPIQAQSTPLPKPASISPLPITNSYTSMKFKFMPSKSKVTRKLQECKALGDITNLQ

SEQ ID NO: 7263 - protein, 270 aa, Candida albicans
MGEPFLKKWRQAEENIQFIIDKWVKIIILVERYERRQQQISFDNGKFAEMLNGFSKLNTKIYPDNEDNNNSTRNDVNVNVVVVDNNENYKQDFDFNSSGDIININQCLNSIGEFFNKSSQVLIDESYIINTKTLEKFKNYLDYLNSLQELFERTKQLSINQIDLLDKRIKDQEIKFKKISEENPDIKGGELIKLRQSIINDKQEIFQQLNKDWLIKQCCLQEFIIFQETQFLITELWVEWCKDRLKCQEKLVGLYDNLNQEIIHDMPLER

SEQ ID NO: 7264 - protein, 378 aa, Candida albicans
MVNFSYQKNKNLELKIYQQTKYILITSINTHPCSYPKLPTDFMIRSCLVRIGNIPSVTPSLHSTPFYTKKLLHPLLIHSSFIRKFSSCRPEFQAVPSLNNDKPLKNTQSSQKNGNNEKDTNSKEEQKVEDDATNTDTLSSGKVLPEGVSKDEFLTEIFGNLDPYIDTYSIYKQLREAEFTPEQSDQIISLLVHQLNSKLTKLSTIYAQNFELENEQYLFESAQQEIRVDITRSRDQHINELIALINILERDFNVINDELNNDYLKLKNDSQVAINEGKSENTLNSKKLFLRIQEANHKITTELNSDIKSEIESLRWYLSRWGLITLLVSLFSGLIIFYNTKRRNVTKEAKKDFAPLVIREPSEYEDDDYHTELDRGSV

SEQ ID NO: 7265 - protein, 181 aa, Candida albicans
MFAFKKSTTSILKTVVAPTSSRYLSTVTLRSIPRTFHNATKVSLFNGLRTTPRFYSVLTESPEAKVYKYADVKDVAVHPENHPDSVLVDVREPTEFGDGHIPGALNIPFKSSPGALDLSEEDFQEHFGFPKPSTDKELIFYCLGGVRSTAAEELANTFGYKKRGNYLGSWEDWVKHENKKN

SEQ ID NO: 7266 - protein, 489 aa, Candida albicans
MSRTKSTKVLIIGAGVSGLKAAETILSKSFLTGDDVLVVEAQNRIGGRLKTTDTSQSKLGINYDLGASWFHDSLNNIVLNHMINDGLLDDEKDVYFDDKDLKTFSSTGEVPIVDKKLNRVLEDIEKYIQLYFNRNLGVPDLSLRDIVAQYFEKYNRLITEEQREYCGRMMRYLEFWFGISWDRISGKYAVTTHQGRNLLNKKGYGYLVESLAKRIPESSLLLEEPVNKIIRNNKDAGKRVLVETINGLQIFCDYLIVTVPQSILSLEESSPYSIKWEPKLPQRLVESINSIHFGALGKVIFEFDRIFWDNSKDRFQIIADHTDGDLSRELTELPKPFTYPLFAVNFGRVHNGKASLVILTQAPLTNYLETHPDQAWQYYQPMLQKLSINDEPIPDPINTIVTDWTTNPYIRGSYSTMYTNDDPSDLIISLSGDFEDLGISEPYIKFAGEHTTSEGTGCVHGAYMSGIYAADCILENIFRNDVTGYTIIG

SEQ ID NO: 7267 - protein, 366 aa, Candida albicans
MSTSIPTESPLTTNNTTTTTAADISTTSGTTATPAQASVPTSTSSIADTHHSSCSTTDFLTWKNPIKTGKVFGSLVFGLIVLKTVNLFNIFFHLAYIGLLISAAAEYSGKLITGKGFLANFKPTGKLYAKRFNDEVLPELANFNVHLEESFNKIVYSHDIETTLKAAGISYILYKLTSWFSLYTLIFIFVVLIFTVPVIYKTYKKEIDAAVADITKTIKTKSAEFTEKAHKAAGPHIDTLIKKTGPIGSFIQSKLPVRTAGSTVGDSKATSYGTDADKSIAGTTSATGTSSATANSTTVPVSVPAATSASSAEPISTGHSTGASQFPSAPTSGLHPSTVEDVIKQASEEADEFADTTQESFKPTLH

SEQ ID NO: 7268 - protein, 757 aa, Candida albicans
MYRRSLILRHSNLPSRCINIIRNYSNSQPSDNKYKDYDFIIEENRSPQDIVKNYLSPEQIEGHIESEGVLPPQEMSPFRNPDGTFIKGKNSAEARLDDRTLEGKIDHSITELPHRIAKTIQNNIIKLSIPARLRTRVAHIYQNLQKNQIQQAPSTPLDCNAHIAALFLQDYSHAKQVLSELQRRVGKDKFKPQRILDIGYGPATGIVALNEIMGNKWVPEEKEAYIVGRKNNEMKKRAKIILSRQLNENYSGKELNLDENVVQKDQRPVQEEEDYVEEEEENSSEENDYVGHIDVKRLHIRTKLRDTLPVTKNYDLIIIHSSLLSKEFNFPKDVDDNIHMVLPLLAPGGHLVLIERGNSVGFETIARARQIMIRPESYPQELGKIPRPYIKGSKGKPQKMKKEDQFITQEDVEFEKELLAKLDYQEALEKARELGEDFEKELNEKFGAVSEEELKFENEDSEELEVFDVNTPREDMYDKVDYHLSVIAPCPHHRKCPLQLGDPKYYKIPDHRHRLNFCSFSKIVARPPYVIELKKGKKLAIRWDKSAEDGIGSISRNAVKRLAGSGRPGGRDTEVGSYSYLIVERSANDLETIKKIEDLRSYSDNVIDENDITNWPRIIATPNKLKRNVKLTVCSTEGNVETWQVPKSLGKQTYHDARKSQLGDSWALGRKTRTIKNQIPEAVKDKLDVLYKTSKKTFKKEQQRKRWKKKVGTSVEEFEDGFFATEVMASQLESSKKYKQQARQAQFEEDPSKFDGN

SEQ ID NO: 7269 - protein, 119 aa, Candida albicans
MYYELFAIARITDPLNTAKEATKIASTVGKLILNNRGIIRDITSLGAKPLPQIISKEQERHFQGYHFIIGFDSSPNVQTQLLRTLRRDPRILRSSIMKHDLTHNLNPGTTIEQALRATK

SEQ ID NO: 7270 - protein, 555 aa, Candida albicans
MLRFRQIRLSPIYKSRLINFRRFNSTNSKKPKAEEEDNNNNNDKSLQQHNVPARQDDKTDVGSFKIKPATSRSAPAPMENTGIEQLMHKDNKPYIPKLQHKRVSFEYPNLPNQDEYTNLVEKPKSITRWTRYIPKILTVIVLVWSGYTYHVWMTDTEEGEDSSDLLNPNEFHKFIVTHKEKIDDDHYIIELTPKFSYWEYSHGTDPEGKSLWNGDKFWSVEIKQPDINVVRSYTPLPLYYLKSEYTRSGEREPLLKVINPEIDEYDKHGTMCLYIKRYNDGEVSRYITDRNIGDELELRGPNIEFKFPYHPLHKLHKRPIFKDLPSKVEADNMIETVKRVNNLPDVDNIVFYAAGTGIAPILQVLFSKKPYLGHVDIHYSARHPGELGILQRFLFFLDKLDRINITYHYDDDDDDDEPKTILNAKDINPPGIPNYITPKTLEEKSKFLTGDEIEQLRLQKEQQDQQNEKSLVGSDMMTKLVQKPEDRGEVFESGLHQASKTIQIPKKPASLAIVCGPDGFIDYVAGAKDLVRNKQGPVNGLLGDKKWDNSNVYKL

SEQ ID NO: 7271 - protein, 361 aa, Candida albicans
MKSSEFILGETAYKNAKKSLQSLIKQYNNQPETINTPPPPDDDDDDDETSTPIPTNNQGMAIHLVISIKIPLSRKKDYIPRIIPISYKLDDVTNKSILLITKDPSTPYRSKLMIKDSPTEDLFSDIISFKKLKSMINKTSTSSTNNKGKKQNLIKIFKNYDIIVCDHRIMKFLPNVLGELFYHKNKKLPFLIQMAKPILLETSKLKAQLKAKSNNNNNNNQQGPSILDGLTISKENKIKDERCDPKYINLQIKSIVKNTNYLPSNVINKGDCISLKIGYINWSIDELLININDIIDYLINKEYFSTIGGGGGGEGIIKDLNNLGNIHVKTNQSISLPIIDNNGMPKGNNDGEEEEDSDFDF

SEQ ID NO: 7272 - protein, 465 aa, Candida albicans
MSKLEQQTPSYKNILPNTYVPYLGHKVLYNILDRLSKNSILQFIILWTKLKNTQPKPPSKYTQHGFNKKITKEVSEFRKLINRTPKRKLIDKIIFEYWTQGLNLLQISQIDCQLIVDKSNSAQSWIYSTVKDMHDKIVPISINPREFLNNLVKNLSSLYLSYIYICKHPKLPIILIRIQVFDLNGMDITEKPHIISHKAYFFGIFVNSPHVVHSINNDAMVHGIVMEAFERSLPQSKNNLLKLITPEDQFPVKSIQSMHILKGCNRSGNSLGIWTPYADGTVDMLPLGAIEDHQVFKSEAEIDEETNETEDVDNLKLQRLKKIANLRFKGSLTGNKQSSNEEPNHHQQQQQPEQDSNLDQTEREGQTNDTEFDSIAPIQYAEFILKEKTTATRTEKSIGDDGRTNIKFKITGSDVFGGLHELSVKSTEPEEIILNPEEVPNWLTGEEGASIGEIRNGNFYNKING

SEQ ID NO: 7273 - protein, 976 aa, Candida albicans
MKPFWIYIFLFILSSVGANESTTSTSSSVEPAPTPSTLVDILSERPQFSYFLRLLQRQGMIPTLNQMENVTLLAPINSAFVGKKSIDWDNNSLNRYIVNQKLRVGLLGKSESVYQTLYRVGNTNYSIAVSPDFESLEYVIDEVSYIVEEDIYAKHQHSYIQGIDQLLPEKPTICDVLMNNTNPEISLFSKIFQSLFIDTDEQQVQSKKKKKKKKHKKPKKTKLPPLPNSCKEFLNGTGTILVPSNKVLKNSLTDIQLQYYLANSDFARYATTTDAVFEIKHDVMSLLQSLMFPALIVGSNNTNSKIKSNLGSSHKFKLKDGHVEVDKVAVTESHVSADGVIHIFKETDSLFEQLNIATAEMIARKSLYALHYSNFVDELYFRSLGHLVDGSSQNQSIFLDVNQRDDVEDDDVEASVASFSSKQNILYQFVDGKVAIHDTMHSLLDTKLCSKKKIGGCFKLKFSISNGKNNITVNDEVHIQAYTPIANESVVFVANGEITPPVNLKHSLGDLISSGAVHRHLENIEIDQGSCLKTLEYINRFGLSSLRDNDEGYSIFLPCGTTDTKGTWKDLGLILTYLERNPHMLEMVVKSMFMEGVVYSDFTSHKTLKDLNGNQVKFKSRNITNDANEATLNNTQLSFPLNSDLLFQQGVIHVTNKVFFPDDFEVPIEELIKTTYDSNFPSFFMWDILKMYPNINKVITGKQPYSLLIPTAESLKDFNITTSMKDLLRFIDFHLIPNSEVTKILDCISGEGYNNSVIKTNLSEGGLTCKHKPQTNKVMLQLHKLNTISTVSYNKDQEVRLLSHGCTKKYQSGTDQLSCVFLIQKPLNLDWFENPKNGDNFLHVHLGLVSVGVGVILGLIIFGGVMVGLMFCIGKREKNNNKDDFEFPRPDSGFMSVLTDDDEYVPYDRGYETDVDVLRTETDALLPSHMKRKKRVKKPDYGSTKQGSNGVTLPRDIGDIRSTLNRERNLPGYSQY

SEQ ID NO: 7274 - protein, 742 aa, Candida albicans
MTDPLTFLDEFNEFFYFPEDNDTFAPNEIGKLKFGSKINATPKSIEVPSSYLDFSPETMNNLPYRLSISGLPSFSRVETQIKMNLTINAPFTNHYVHITPDLISKKKLCLEEPYSNLDDNIKKHILEFDAYILTQSNKSCAVCPRCIKREQKRASRSKAGEEKSAVWDCDVERKAIIINNKEIIAFQSGVLELSARIICYCRHHKESEGFKLLIVLKNHLGQVVAKQISSPIMIMDRKKNLKDSAPSSSANLVELDKKKLSISDSDNEKLMTNQFVQLSPNSLDESASEALATTDYETRGVKRKKLSVDDSFNTTSNPMYNGFSGYSPMSNSDTNTSAISQSFSGPTISKPSSAQFSIGFSPISQPQFPSQFQSQTQLLQQQQQQQQQQQQQQQQQQQQQTVPSIQKIIPAQGSIRGGIEVTILGFNFRPGLSIKFGANQALATHCWSETTIVTYLPPAAQPGQVLVTFENQDNDNVGGPQQQQVFTYTDDTDRQLIELALQIVGLKMNGKLEDAKNIAKRIVGTDNNNNNNNNNNSSNTNTNTSTNSNSPADNENDNNNTNNNTTAGAAAPGAAPGNTVTSTNSNTSSSFENDEKSMAKLNKLVEFFESRTNNQDDLEKWSSMKTSEIFGDQEEEYFADSEVVPSYKSIFPNGGNANNTKLIAEPTPEADAGATSDSSEDMVVTYINHPRKSMKNDKMLLFFWIPALVIMLFTFFMVYVVGYQLNDYSIVEKMLNCTSLLR

SEQ ID NO: 7275 - protein, 246 aa, Candida albicans
MARQNFVGVVISQGKMTKTVKVRVQGRVYDKRVDKEILTRKDYLVHDEGSICKEGDIVRIESIPKISKRKAFAIAEIKVNKGQQFAAYEEMAKKQVKLEEEKEAKKFIEHREKFSKIITQLDDLKKMDKLTHEITSNIEEDHTKLIEEINQIKEKYNIKSWPTTESTVDLGLNEPIFSDEKEKRLYFIQYILNELMNNAKYEEIRKSIVESKLKKSMEEVSKSIQKNVVRRYLLDTRNECPVPLPQ

SEQ ID NO: 7276 - protein, 549 aa, Candida albicans
MFESDLSFYSALLILCCPISIVFFKKFPIKGYTGANKVSLFLQCLIAILNLNILYSFINSLTITLGHDGSSANTLTIDPITTTQQQGHVDYTPIKVSGYTFKNQVATKNLQCDSIVYDQDLDLQVSQAVDLNKPEDLKFFRDKLNELRSLNNIYDLFFQDNEDEVEESILERKWYKFCGSAVWLDKYGVYFMVNRIAYSKKGTRNNPTISVLAGQVFDKNWIELTGKKFPFSGLEFPTILPHYIDEGKEAEKVILGAEDPRVILHEYTNENGIRIQEPLIAFNALSTEVDWKRAMHIYRPLHDPHRIIRLSIENYAPREKEKNWAPFIDGNNLNFVYNFPLRILRCNINNGDCQKVSGPDFNDKSHENAGKLRGGTNLVEIPSQSLPKHLRSRKYWFGIARSHITDCGCVGELYRPHLILISRNKKSDQYELNYVSDLIDFNVNPEPWTPGKTTCSDGKSVLIPNSVAFIKDDYMSVTFSEADKTNKLINAKGWLTYITKMLEFTQERLKDESSDPVLESRLLSKCSTFLAQQYCALSKDTMGWDKLSR

SEQ ID NO: 7277 - protein, 447 aa, Candida albicans
MTDLTKQPLKGYDNLSTPTLFNDRNLHPIARSFTTNILIVGGAYSGLSALRSLQSHLAEQIQRFKQEQPSTPIKKLSLTIVEPRNGLLNILGIPKSIVDSAFARTQFIPFKDLNNCKFANIFSDTPGEYDISWFGDDNEWLDINYVHGRVTYLDQHKAQYTLGSPVSEKAIIEFDYVILATGRDRNWPTTPLATTYGQYMLEMDNARQEIANADTISVIGAGAVGIEFAGDIKTKFPHKTVNLIHPHECFPQEPLSNEFKRLTQDSLERAGVNVYLNTRIRAESIETRHGDLTTTNNKTIHSNLNIWSCSKHNNIGFLSQHIYENYVTSNKNISINQYLQLYNAETNTTIENFFVLGDLVELPIIKSAGWAMYMGRQVANNLSNLIFNGIFVESFPDLNAIPYGMVIVGGNNEIISELAGEVEVDNEHYKQEYEDYCIGKIRATIDM

SEQ ID NO: 7278 - protein, 794 aa, Candida albicans
MPQDNPESTNLTGDIGNNNNNNNKGEQQSPLSGQDIAKNNQDHDNIQEILQSDSIFKTPEQVETHDILSTLTSNCYNEQGQELNLQGHQQINIHPDFYYNKHNESIFDDERIFPCLPTTNDNEDLVKYDEFNPELINHATIKALIIQMTSPEIIDYSLICDFFLTYRMFSNSNEIMNLLLTRLIWALQYLNSVSEDNIKIGKLVLVRTFVVLRHWIINYFVDDFNNNNELCDYFTNTINKITLESNLIPQQQEPTNKVDSNHSLFTRKILGDLKIHWLKIINEFWLLDLDIHSMLTNNSAYDYILPLTSTLNNIKKLSKSNTEASIRSNPSYRRSAMLSLYDQRIQHKMLIFDDTSSNNQQENPQFSINNLLLHHHSSRVSINNKIKTIQQQKKLLKSPTFSSSFNIPKSPLISNSNLANIPSPTPAPTHTLTTPTRLHSRSNNKRALMQSNRHNHMNIKDSSLDLKKTTTTISRNFDRTDIVEQEGDTDFDEEKENEETEEVDFDQVHDIDNDKSPESQFSESESKRYSQVGFSTNGNIKLPTSKVTVIVPPTPVKKMEKPPLIEDDIQPSSMTPPKLYHPQFQPPPSSSNSIRTENEDLNRRGSIRKLMDNWKKSLIVHKVSSSATDMPINRTMSTKPSTEDLDRLINNAMSVMNEKTVIGKRVDVLSARIIDELEYLIRYYISSESSSVIHEMNYHDDTGDDMEMEVINDNDNDLEEEDDDDRPHRRTRQDKGDVDLHPIEVSPTRADEIEMDINDLSDLNIVKIDNLINDTTADNSHSVKVPRNISTSIS

SEQ ID NO: 7279 - protein, 233 aa, Candida albicans
MTENTTPYYKKQASYQDKRYTINKSNLIEPIIRHRIQDSLFYKQHLYLSNEATILPIIIEHVHYIGGTDSSNRPSTFISCLFRLLELEPSKEIIKTYLTQLDFNEFKYLTALTLIYIRLTYPSQEVYSIFDQYFQDFRKLRIKLKTPVFDSQKLPIHYKITFIDEWVDTLLVNERVIDLMLPRLIPRTTLVERGQLAPRQYYIDVSDEEEKDAGEEEKDAGEEEDNDYESDSD

SEQ ID NO: 7280 - protein, 1107 aa, Candida albicans
MPPEELHDSDLSSVASSTTPSTVQQSLENENIPVQLDESKIVGDNTENYIVNAYFPEGDERNLAYTIVKEEPEIKPSLWNKFVDFVWPDYILKHLDYPSFKITFRSWCQLWVCTVLTIIPATSHWMGGAAYLIIVLGFITVSGGTSIAMNTLSSIAGFIGVIIAFLHHVITTKIINHIHHGITPETLTKNLIDEGLCHFDSGLEQCIQDQIFTGRYITTTGSAVTILSIITCTFIVGNMREHMHPLWALVYVSGQIAICIFACYGHFSPLFDPLEIGYVVIKPFALGFIAKIVSALLVYPTTSNWSFFNGYTKILKGLKSSSEKNAKFFKTMKPSASNFGNYKMFKKEILKLRGSMAPLEIVASTIWLEYSYGRFDVGDVGEFRSLLKNLFTSSSTYTYFYQLLEERTHFVRNEFALVRKRSNASSQFARKPAFDKTDLSYTDVAEYELRQRSKIMKSRIILQGEEDSRLTTIVIDEMATRISQYFAGLLDNADTGIEVIAEWLEAANDFRIFSWVPGQWSKHVSLQEQLNSKVKVVKSELEIELAKFDNVETLKKIMIDTSKPEKEVLFLISQGVFFLQIVKHQCENILKVLDYCLELDERRPTPKFITYFSKPKYSEPKHLSNKIDVTNPGSENIVRKRNADTLPPINLFQYIGYLFTKLYKYLISNEFWFWIKVGGIITIGAIPYFVRPLANLYYRNRMIWLVIVIAVSISENTGSSVYVVFARLCYSFFGAVVGMVAWYISCGNGQGNYYGYGAVTAVLFMYFIYFRHFSVHQTLLPQILYSVTAVLVLGTSWVDAKYNKLANVDVGYKPAYLRFIGVAIGLCLGMLAVLLPKPISSKAIVRNVLAKTISETGNIHCDVANFALARLETPDYNIKGRQDAVLSNYSSLLMRMAGLSKLMSLKLEVPIAGYWPESKYKRLSGLVTDVIQLYLMLSSALQGLDGPEKWLPVVIKRVGFCFPDLQAEVFATIHMASDALRTKQALPKITEANISLKHMELLRQQWGLRRISLSERFYCDSAINNNNENTSKELDHYKLFSNDGQLNIMSLLVAHMIYNRLDEIMILVKGLVGEIYDLNERILVDEDDYFEFKQDLEFSDDKENSAF

SEQ ID NO: 7281 - protein, 138 aa, Candida albicans
MDDAELNAIRQARLAELQRNAAGGGSSTNPSSSSSGGAQDSAQENMTITILNRVLTNEARERLSRVKIVRPDRAQAVENYIIKLYSMGQIHQKLGEKDIVQILDGLSRDSQQKQQTKITFNRKNIAADDDEDDDDFFD

SEQ ID NO: 7282 - protein, 319 aa, Candida albicans
MSTKSANSTAVNSFNANHSNYDVFRPSFTPVLVNTFLVHLGLATKNPDDTFTFDISKHILEIAAGTGKFTRNLVDNGWTDNLAVLEPSKGMLETFNKNFPQIKNQILGSSYKIPLEDNSIDAVIIAQGFHWFADLDSLKEIYRVLKPQGKLGLIWNFDYASPSQDSSVADSEYFNAGTQYYNTLNFNLDTNEKVFEQYFDNQQWNKAATKFIYGFDVNVPQYRHGKWRQVLKDNPYFSSEETNLFALYDLIVAKDDAWKYWETRSYITEKSDDEKQRIKQNFNELVEKNLDDSSYSDKDKQLIIKPMATHAVVSQKKSS

SEQ ID NO: 7283 - protein, 388 aa, Candida albicans
MRETTPLKKSYKKYKSTTREDDSEVSGYYDHEQQYEEYEDSFSMSKTTKYTLFTIIGLITLLALYFFTVFLPDYFIPEAVALKPIENISDIPVTLVPSSNKENSEANDKKMVDRIILIGDIHGHYIEFRKLLTKINYNKHKDHLIVLGDFISKGPDSFKTLDYLINNNIDCVLGNHEYYILQNYATFHGLDQPNFSSSESQPIAVKDSFNDDPEFLLAKKLEPHHVKYINNCSIIKKLGYVPNPKGKKKNKVGDGADYSQGIAVHAGIRPDLPLDQQDPIDNLEMRSLIGPFYNETTADPTIPNSKSWSKIYNSKNGEYPADYIVYYGHDAGRGLKIKKFTKGLDSRCDRNGKLSAMVISKKQVTVDVNDYDKKKSFELIEEVVQVNC

SEQ ID NO: 7284 - protein, 207 aa, Candida albicans
MLRKYSTSCLSESFRLAMGRVSSQAMILTSATSNLNELHGMTLGSVCSLSVFPSPLIQFNLHLPSYTSSELHKHKYLALHVLPPTKNSVHLSRIFAKGVKLNKGAKLAPTKEEKIDGQVFHEMTKPFTRLQKGVDYSFYNISDVQIPILSNVETTLICQTRNTFPVDNHEIWVADVVDIIHNKTQKSGGILYFDRGFHKIGKSLSED

SEQ ID NO: 7285 - protein, 447 aa, Candida albicans
MTDLAKQPLKGYDNLSTPTLFNDRNLHPIARSFTTNILIVGGAYSGLSALRSLQLHLAEQIQRFKQEQPSTPIKKLSLTIVEPRNGLLNILGIPKSIVDSAFAKTQFIPFKDLNNCKFANIFSDTPDEYDISWFGDDNEWLDINYVHGRVTYLDQHKAQYTFGSPVSEKAIIEFDYVILATGRDRNWPTTPLATTYGQYMLEMDNARQEIANANTISVIGAGAVGIEFAGDIKTEFPHKTVNLIHPHECFPQEPLSNEFKRLTQDSLERAGVNVYLNTRIRAESIEKRHGDLTTTNNKTIHSNLNIWSCSKHNNIGFLSQHIYENYVTSNKNISINQYLQLYNAEANTTIENFFVLGDLVELPIIKSAGWAMYMGRQVANNLSNLIFNGIFVEPFPDLNAIPYGMVIVGGNNEIISELAGEVEVDNEHYKQEYEDYCIGKIRATIDM

SEQ ID NO: 7286 - protein, 407 aa, Candida albicans
MISLRALFDLVTLPIKLLLALLKYPIFGGVNKRYKNDLANSLKVILCRSLINFPVKDTPIFATTPTGDMINKGIGKTYPNMTKLPHFGEKFDKQSYWLVESKNRKPNDPVLIYLHGGGYFLDVAPQQIETLLSIYHLLEPAKKSRFSILVLNYNLTSKGFPVPHQLAQLVDTYTSLVRGGSENLLLMGDSAGGNLAITFTQYLRLNKPNLPYPRSVILVSPWVKLIPEVYQNTPGHSYYNYSANDVIQYDRFSSAEVYQGTLGNTKLKSLTVSPGNCPYDPKDWEEIDTYRKPGYSVFVLAGEHESFRDDILEWSKYALDYPIPPNLGNSDGVYNPKIHKYIRNNKDSAHVDVNIEPLGVHDVCFFENLLLSKLENDANLTIDGVDAKQFFAIVNIVKFLDTVLPGK

SEQ ID NO: 7287 - protein, 414 aa, Candida albicans
MLSFKGWKVLLSIPIKLLAVLLKYPFAGGVNKKFKYDLLNSLKLILYRTALHMPVRESALLSIMSNHFIINKLIKNLYPTLTKLPSYGKKYDKQSYWLVKNRDRKPNDPILIFLHGGGYFFETMPCQIESLLSIYHVLDAPKRSSLSILVLDYKLASRGYKIPYQLTQLIETYTNLVKDGNTNMMLMGDSAGGNLALTFLQHLRLDHVNLPYPTSTILISPWVKLAPDEIQNTPGYSYHDNTPVDMIQVDFFRDVEKQNAILGDIEHTELTISPGNCLYRHEDWEDIPSLVEPGHSVFVIVGEHECFRDDVLEWCHFALKSPLTSQRDDSRGVFNPKIHEYIRNGNDFAYVEVVVEPWGVHDSVLYFENTIISKVKKNPKLKVNLLNSHEYFGFIKLVNFLNNVLPGSSQTKFV

SEQ ID NO: 7288 - protein, 398 aa, Candida albicans
MERIPLSVFEKFNNQELLSDVPEDRFISKSLQSPEIFSTPCEECTYFTKSNNNNILKFDDTTGLNTVLVSYTQQSKKRKQKKTNASSKGRPKIIGSDLTQGFSDFKPESLKDIYSLNDIFKSIQYLIQNKNFTPQDFKIVTARRHLQKLMTIPIHKQEVQFNVIYWKGMIFFAYDWKSESTTKVEDPYNKLIQYTGFKFEEVVSEGTRDSNFYTVVQHCVDNIPVIYTAEVDCSIDKETGLENYIELKTHTKLADDKISTINKLNKKLLSTFIQTKFIDCQHSIIGFRSTDLKIASIKKYTQRELAGEINSFPVILSDKCSINTKSIFQWYKLIMNWIISKEITDHNTPQIFRLSFKRDQELMNSYLKLEKILQEDDNDTIFNDLVPEWFQSFIMNLF

SEQ ID NO: 7289 - protein, 728 aa, Candida albicans
MPSTSKVTTNNHAQDSDSNEFQQLTTQIDSTISNLKQKRDYLQDQLAQFESVRQGLKTSGDSTTPIKFQLDDGTMIEKTTTEAIEFLDKRVTEIKEALTQFNTKINEAESTKEKLNQFNQFVQQGGNHEELKQEKLNEDGLPFVDIQEELDEDGNVINVRFKDAQEDTTIDKNEKDSRGTPKVEILGEEIDKAKKSDKVSQSESDEFQALLEDMEVISKDKKAQELNFDQDDLLDKIDKLQISAEDKFKLKQVCVEEFKNLEPEHDTDKTQENSASDKVIGNFENLAIDKNDLIELELLADDFDDSENFQGENYDDDEEWDYEFDDDDEEEEEDIADELLYGGGKAKIIGSDEKSNNMLWDQIINLRKSKLVATDQVADKIEESTVNEKKPKAVRFAEHLDINEVENISESLRNPPPETGKMSLFKQNRMSSQQKNRSEEIMETVENDSVMTDILENDVMSDIVEKEPVMTDIIEKDDDVQIVDNSDIIESSIIEREPVATINESTPEAKTGTVSQKPVSRFKAMRSSQPLKDTGKLNTQAPVKIPIPGDTEKEVVPSESPTSLSVSKLQDLQSDMDKMAQAYVSGMYDDDIVTEGPVVHKLDDFETLNKMVEAKKQDNEKLGIQEYDAASNEVGMEIDEEDEDDDEGPILVDEIVENELDESNGVFNDEVIFDREIRENYHKLRNKLILDQNGFKKSQQELEMEPVDDEGNPIKISRFKAAKMNRGG

SEQ ID NO: 7290 - protein, 162 aa, Candida albicans
MSMKSKIKSFFGKNRQYAVAGASNNPSKFGYKILNWYILHDLPVIPINPKEQEILGKEVVSNVSAIINAIEKHQDISNYKTSGVDGLSISFLTPPAVTVATLEEIGKIDGFDKVIKGLWFQPGSYDNEVLELAEKLGEFDKVVHEDECILVRGEEGMISANL

SEQ ID NO: 7291 - protein, 191 aa, Candida albicans
MSESITITANSIDNPETDVRRNERFHLVPRKRLEALVTTSGLIGAMIGFYDGVKISSLRYLTENAHRMPKTVGGWYFYHKKKNYVMIVAGVKKAITTSFKYGAAVGGFFGLEYLLDISRGNTIDFFNTTTAAFLTSTFYAKYNKLSSMQTRKMIFKGTALGLTLGLIQDYLIHARKGRVWYLDRYTQQKLV

SEQ ID NO: 7292 - protein, 989 aa, Candida albicans
MAAQKKYICAFCARAFTRSEHKQRHERSHTNEKPFHCLHCTSSFVRRDLLQRHCRTVHHTNLNPSTLPSNKSLKNPTTNPLDLSNNEGTTTTTKTGNRKNNSNKNGAKNDKSTNPNPAVSNDDNRSSVGDITTQLPFQVQFNTQLPYQQQQQQQQQQQYPILQNQGIPMKQSFSMESDQHSLTTFDSPTSSLGVSMTPSGSTNSEIVLQQQQQTTKRRKRSQENNSNNNTKLIAKELNHDLVHLLSITKKLTTLLQHYDNVKVNITDSFLIGYVHIQQQAKNFTIFEKILKDLVYYLNTYHINNLQQQNQFPPSQQQNHYTINHFKIGISYCVIALGFLIDHKPNRAIQFFKKSWNLLIKTLIPQYNSNNNLLDQIEILYNLFLLCYIYLQFNLETFDINEKQHEHHSYEQGDEHEDHHQEQVYINNQVILNYLNDISFIIASNLKDVATNNLIDHNLNLFWNIYILLSSYITKEPPKIHQILLNKNLKQNDTLVSLMQKFSKSFINMDMDDEQLKLVVVAALNNELKLYFNDTVDEFEPENSKNKRKFIYDNRNVLHNAIILINKSINFYNPSASLVNDAKMFELKLFELFKKNLIINSPMKYHELFNNYIFIPQHYYHWQLLTLTLKEINQNNVIFNQIHSILTTTTGSNVCFSFIDFENLLKNSFLNYKANPIVINNNLLIISYPIIFLSNYLNLDNLMTSMGQMNQLQFINLNIFIIEWYLIMMKVLIIIWDDTLIDFEDNYILQTLMYILLDNKSCLLKRLNIDTSKLEYDVNCERLSFNQKWFWIIKLKFDSIFENWMNFLKNKNNNVTNNSNVTNTSTTGVTNTNHDHNDSYLHHFNVNVSNFKFNLNKYLNEYFVTGDFKFREQLDQNDPDQFQGSMSMDEEPDFTTAMQTSQTINSFMPIHNHNSRNQVYQQHNQDTPMTSRRDSTNINENNIAQTSSFISNSNYQGSNSNNMINYNEFQDRNYKRSSSITLGILAQTVG

SEQ ID NO: 7293 - protein, 203 aa, Candida albicans
MTSEVIKFPQFPEFTIHISLFINVSSENITTIKSNLISATDNDHNKYDYCFLNTKYIISKEHLFQSIYKSLLNYTSKLGLSTRNLKSEIIYNLSPINNVGDALKRFGISEDCPNCIVIKIINNNNKENSEETKISEKVTTDLKEIIDGELIELNDQYIFENFIDLAKFRKLYKLNDVVDLNKEDNLQGRLTRLAIGACILRGY

SEQ ID NO: 7294 - protein, 149 aa, Candida albicans
MSKDDKDLEEIWKLFQDSNEDVQKRRKEITKSIQKDTSLNEYPGSVSMMTALDELIACFALGGQVKNYYRYGTYDSCTRQREKFWFAIKHGSFREQEERPLEESSERELTNRIKVQEFYKKRFLEDKAKGSSEDIWNKREELLSNPFKK

SEQ ID NO: 7295 - protein, 133 aa, Candida albicans
MENVLSWGDREPTYIIKRPYSNDQLILGGYFQKDDWTAATLKEQTQDILQRTTSLFPKILKENPNGNKIEDLEILRVAAGLRPCRYGGARIEKEVVESGKILIHNYGASGYGYQAGYGMANKATDLALGKSKL

SEQ ID NO: 7296 - protein, 121 aa, Candida albicans
MTLATQFAETTRYSVSNTELKRRVLHLYRKYIRNANEFADLYELDMPVSNIKTKIRQEFERQRFGNDLSVNNVLLMKGQMEFQELINFWKQQCHVMRYFDEQNSYNVVDKNDFVKNFLRGN

SEQ ID NO: 7297 - protein, 108 aa, Candida albicans
MTVATQKFYYQPSIEANKQKLQHVHDVASLALGVGSGILTLESMNGFIFYLIGITVTNLLFYIICGEGRPSKYFKNPLQEVFISGVFSNIPGFIMMWCLVYALVKSSS

SEQ ID NO: 7298 - protein, 1174 aa, Candida albicans
MIRQFARDLHINLRKCHLPSTSTLQSYGFASLYYQGFKSSKYSFTIPYRSYATFDYTRAPSKELVASFFDHQYVKINNWIFKDDQYRQSFLNYLRNQSSFSKDEIKEVVELHGRLVEVLNELQIGFQFLEKMWDAIFNRVVTDESVTALQKAIIEERDPLTNVLIRSARYDLYKKIITPRLNHSQMSINKSDELIEIIQLQSDKNAGITFNSKNIENYLLNENKNLISKQQLITLIICTSLKLNRGLQYTERDYTTQLYLIENFMAWTKMIENNEWFCNPDATQYDEVLKLIGIPPGDYRIEKYLQDILKLVEQEYQTKNSYIFITSIMRTLVDKAPHLTYKYFYFKDAQIRQRSLNRSNVLIQDDLTYTMQACLKFDSQKLFDLYKNNQDLHDGDEGGQESLILELSKVTKDWNALQKNFENMYGRGNLPLTVHYGIAMQALNTLRADEELGRLYDQLQKRGLHLNSTVMDALIRSKIRLLDQTKVIELFEVYAKMSSQGKADPKSVQKLFPLILKIPMRNRETSVVLDYLKQYLQREKETGRIFIDGSTFQKVMQYAVGIPSLKTIEATKALVEEYGKQSTEYYAGLISAYSNLDQFERADNMAYEAHRKSKIPFGEIQIWASQLKNNMRWKLRSPDTITSQYNEIKINFITKMSFCSAFQLFYDQGGISLISDIIQSLHNHGKLKQELTIFRRSKILQLRDERIYTTRLDFWRRKFEWHEILKEFDEMNGKNILITARTYRFVLAAVLNLDAKSGSNFDNSTDMLKQVLRFYGLSSDSTKNDRLSLEDDILYLARMVIDFVDIVGPEQSSSLYLNFVKQIYDKLGKNLDFRLSLILYEGLVKIFNEDKITMTKEFHRLGELVDSYIKDYPFKEVPIFPYRVTRYYGDMSVSWLKSHTPTRADELKILRVLQSGVKLETDQYTSVLKYFLEKLDDDEDYLDQVLKIMEDNLIHGNLDEYRSYLEKQLCYKICLKYLMDNYGDEDAIFTSYQILNNFYDINGPDQVRENLKSTNITNFLRSSSGRLFNIKTNPYGFKSMSHHKFLDYFNPEHIAQKGLFASNDLILLLRIQILKYCQNDKDKLRTYFKKHPKTMKFVMTEKSTILPSKFKGFRSIIDDISPLGNLNWKQNRIARASRVLKSLLLDTKYQMFITADANQSTPMLTKSPKHDFYE

SEQ ID NO: 7299 - protein, 168 aa, Candida albicans
MVVGKSNIISQSRHLSSTSICLRFNRRATMDKTVLLNEAKQFFGPTNVKGEHCKNKFFYPPQNNRPNYIVNDGRPLVGDQFPTKRPGRNSNNRERNPTVHPFPNNIYTKTAYLIPENIKDKIVEDATTNGLHPQEIAHKYSINLLRVEAILKLRDIESKFVPDVCINI

SEQ ID NO: 7300 - protein, 278 aa, Candida albicans
MGYPPNFKIVTKSLTENILLASTAFSRVDKFNFGARMAVFKFPQSNKIILWSPLPYTPQVIDVLTKFTNNTNESNLNIAYVIIPDREHNLAAKSYKEKFPGCKLIGMEGLDENSLKLDYKFIKSMGNKVLKNDELKQIFNDSDSGLIVDNFEFVYLPNHANQELVVFDKSSSTLFEADLLFNLGVPGSTSGETILEQYSPELGFPKGFNPHSGWSFITRYLQPYSKVGRFLFRKLVDINHSKPGLEAIYNSWDFKTIVMCHGNIITKDAKEAFKHVFV

SEQ ID NO: 7301 - protein, 113 aa, Candida albicans
MFESLVRSGGYVWKFTSRLTTTQKYKLRSRMKQVDENIKNIYQGLIAMENKSMGEPTGLKKIDYLQFEFPKENEMTTRDKYTTFNRHSKNYRKPVHRVPKWTKLSFRENPKYF

SEQ ID NO: 7302 - protein, 386 aa, Candida albicans
MPTNKPETTPGGENLLAALISCTTAAAFSATCTYPFDFIKTQQQLNNEKVMKKWNIPGNYPNSLAQLYKGGSALVLGSIVKNGTRIIAYNWSTQFMSIDSHNGNNNKTTAPRIVIAGVMSGFIETLWLIPFENVKITMIQNQTLANELKRCKNLGYDITGKVTHSPSTHHKSTKPIYLRQYVSPHAYLSSDVIDQYIKQKVRFGGVPIKDKALESLKFHYNKHPSLTLFGTVKEMYELKGLRAFTAGTFITFTRQIGISWVWLATYNATRQLIDPHNTNNEWFGHKHTMIQSVGLHFLSSMAVIMVTQPLDVIKTHLQSKNGNSLYRDSLSTAYKLFLQQGPWALFKGAFPRFLKVLISGGLTATVYEYVERLVDVAGHQKIFSQE

SEQ ID NO: 7303 - protein, 736 aa, Candida albicans
MNHDQILQTISKNNTDFPIIESTTLAEIAADLDTNANEAIDGSHSVTKSHDNEILVKNHLNSSVIHRIKINSLKSINGSKLYGNNKNINNSATNIAPESFMSINILYPISTMSILALISNSNDSSNLDCFQNINYFCNETINLRQCHLIELECELQAKGTSADEIPERTNENIPSSDSQKHFGVIFPLPNHIYGFFKLENVEITSIQVLLGNENIRHDIENNWLDIMSSNDLISRCENLHLDSENINTGKRKESLSSDIEFSMKPPAQIPRSSSFMSSSSLSSSLTIKDDESKNTTLSNDYQMEKKIPSEEEEGKDQVLPQVIIENPIDFLTTRYYSTLYSLNNPLSYFPKTALPRFKNLISTFKSNLDIEENSKYNDEHTNSSSSNIIEGLREFWLNVDAFDRRHNQRYGVFGDVNDGSDTDMNNQVNDELSNIELIEQQKFKSNHGFDLNQPTTLSEHQENSETMDIDNKGNENGNQIHGITMEKLSQLILDLKIREAQLQILIIFELLNLMHVEEQEFLTKNKNIQLDKEAQKSKNQSLVRRKRRKNKKKQPNSEKDISSPAIIQSVETEKQFQLFMSLTTYIDRLSLWDTLSVKSGGAGMYGFIGYVLVPYFHKKLPKLVEFVVESMKSSNMKLVSLKRKKSDQVDTEEHEQVDTEIEHGTTPQESDTPKHQDETLKMKPISKYRKVLLDKNPPKLSKSTGIVDSDDFKPLISLKKSKSNLSANMYPYVKSI

SEQ ID NO: 7304 - protein, 467 aa, Candida albicans
MGEETPNQTHEILFNDFIPLSFRITVAIHFGLILWLILNLLLTNFTSINVLHLLKLSYTPHNYTHLDDLSHNQDTNINTNNNHNHNHNQIESLGEYAAFLPSDPHENDRLIKGIWSNLKFVSIINITCWIIYKSIANISWLTPLFYTLPLVSLFMTIYKLFFKNSYSSPGQIRIFTTIKRIIRGNINSQTMRTNDILISDSLVSYSRVINDLGLVIWNYWFDSNIGYNYKFESMILSIPTWIRIKQCWYEYKLTGKTQHLFNLIKYSTGLGPLLINVLLKRMLLNATEQEKTSGELLLKLNHLNNWLYFALAVNSTYSFIWDIKMDWHLELFDGLFSVISGKKTSHSVVSVSNYRFQILRKQLALPRSIYYIAIIIDFILRYIWILKLFIINEELKKEKIKFIYIFSTFLFGYDAYSLGYALIETLEIFRRWIWCFIKLESDWVELYNDQDLSNQDIELETRLPKQG

SEQ ID NO: 7305 - protein, 449 aa, Candida albicans
MTQDALVIICGLLALMYLGIYSLHYFQDVPDLYLQEQSIREPTRLTNESPIYHSNKSSNLRVGLDIRYDSYKLRSGNLNDIWEIAIQFAKKTDRGINIDNNLITIGYINYCIENLQLGSHKVISIPKDYKIDSKWLVVLFVGFVKQLTVEFYIDKPIADDAIDISKISLPSPPQGSYKFINNYTPEKDKGIAIRLHNQISQGIKSIVDFTQLNIVSGVASTIKHLPNSDTYRNSKMVIVSNNSTNEDITNLIVKLLTGLILNCNITICDKFSEVDSNAAIISVPESKLPFVSNKSDTITERLQRYLLTKSVFPFRGTKKLIYISTSINKKSALSLYDLNTIRIQHQARVVKELCYYNIVGPIILTDYYDYRQFNIKVNKVGCIAQSLEIKLINLQDEWGNLSVRGYTIGKTLNVVNDQQEKLQPKDNDGFMPISIVKGKWGNDGCLYVL

SEQ ID NO: 7306 - protein, 814 aa, Candida albicans
MNIDEFKSGLKKLTVNKRVIIDDLTTFAEKYSADAAEEIAAAIHEHIRTCPPQHKLLAFYLLDNISKTVGNPYNILLANGLYQLFKDTYVIVDDGTRHRLIELFRTWEHYENTSVFNMQVLENIEKFIQQAQNLRSASPGLESLSKSELTPRILIQNAKDLLKLHDELILQVENFVKGDYHKFLSDDDFCFIEQFKQIQVQLYESINEILRHIYEDVNSYHNGKEKLVNTPQFNINAGKYKIDIVRNQKELFKQQQSLTDFLATCKPRLHKAYMLKKEKREKIKYLKKYRFVIEKRPNTRFFSQVLNESEEFIDLIDKFGKVAKFTPEELLFVNEPQLIEPPQNEAHDHQINSNFLGFPVDIDSLKEPATTQDKAQESILGLSINLDSLLGSGNNKTRNSNGSTDKSQDLAPETLSLQLSSHQQQQEQPMAGLSILSSLPFTSILAPTTDQPPSIDQPQPVWSQNNTLNSQNHENKSLTSDQSTQHDKQMQLTTRGPLEVTRTRNPEQDPDPQPVLSTDRPKPLEENDGVITYYPIFGDQPSLVNNGSFRHPRKVFRRSVQAQSIGDLTLKYIPEFFKQYEIDINLPNFPIPSRFPNSNQFPVIPEFRVNETNLDSSSISNGDQVLQIEYHKDTTENGNTELANNGESIKESEVPKEQPVISTNEGQPTVENDTSAANEQEVHPTTSTVQSSNTSTANEEVERVPQTAPVLPPRKLSLNDYRKIKMNQANLPHSPTSQSLPPPPPPPPPPPPPPPASSHSSSNNKSSERSRLTDRQSYSSLAIPSNRPKSNLKRKGTNDEPNRRAKQVKFANNI

SEQ ID NO: 7307 - protein, 429 aa, Candida albicans
MGYPEELEKIKELLEEASATCNFKYMLITQGISPTTDVAFTYSKHFTHEEVNDYRVVFGRSFTSIRPVLNRTYTLKLSRSSDNWDAITRQLHDLFNSLNQGVCKEIAKLWIRILAPNKQKHFPYSKKDVVPNWWPRDVVHTEPDHLRKEDRIKVLINVVTNKNFKFRDVDTKSIKTKVEHTEAIIHEIIYIAYLAGLFYFGHDRDNETYDILSSNDRKLLEQDEIEFEVSDFRYFGNEGISQSKIKDEYLNENLFRLKGGNTEPTKQSTKQSNKVKKPRKLSKKSSTKALAKVKLDLLDPQENFDLRITPEAQPRSQSPLQLPQSTPKDPAPEFEFPFQDTASKSDLMMHTQGDEMSLDPTFDPNTGYHIVPNTAPDYMQNYFNMNNDNYVDPAAAYIPDPSETSQYISQGVKKKWEDKLDSLFEEDFG

SEQ ID NO: 7308 - protein, 232 aa, Candida albicans
MENIENLKLYINSLSQSISAYESALSPLQNKQLSDMILNINTTSSTTSTTSTSEEQQIQILNNFAYLLISTLFSYLKSLGIDTDSHPIKMELSRIKSSMNRLKNIKNEINGDTNKQEEEEEEKEKLKKSKEYLSRTLGVRDVGSSVDVKSMGTSAISKQNFQGKHIKFDDHDNADEKKDDGNKNDLKKSKNKKPNSTGSKSNSKSKSKLNVKESKITKPKSNKKSSTKNKNK

SEQ ID NO: 7309 - protein, 943 aa, Candida albicans
MSSNFFKNTQNNKGVSLFGNTQCSDETGVSSFKIRPSPNIDIDSSLGSEFEMGLDFNKEDLHEKFSDSVFEPKKNVDKSELSLVTTFTESSKSNETRASLNSCTDASIIEHETEPETKKGLDTRTHKTNTLCLFNQPKSNKSKKTENSTSTTKMETKKLITPRVFDGKTTMQLEERSKAKTISISREGVSKTQPQSQISSNFSAVSFSELIGQVEATKCNLEKELDLTRRKLSKVESEKLERDQNIRILTDVNARTKSQVEALFKHVTRLDSDFNDLRHEKDKAGKKYQKIKDDTNRYKAKVGELSSILDESKQSLNSMRMQMQVHFKVKELEIQQKDVQLDEISGLLSEEKIKLAEMQKMSFDLSQWESKMLEMNQNLATDISDRFFNSIKQFIGSENLNNSLESKFQFIEKEFKSFLSNEIGSKVAELGAASLDKNQKLSVLVSTEFEKATMAGTKNHATTRDYLLKQFQANIGLIQKGALDVQDVRLEYDQKFKSLESKITHLETTKTQLERELSSHKSLSHDKILHLTEKSHGLQEQLAIAKQKLIDCDSTAERSALNILQAQEELEAKKVLLHEKDTKFYELQKNLEFQSFALQSKVNEENKNRLFFIESRNSLSKEVKVLELVIKNLTRDYEACQRVKATETLECDKWKIKYDDMKEQNDLLQETLRNCFAQNQESNDTVSQLMQQHVEQLNTIKSELNAERKKTTSLEQTNLKLQSEIEAKELSMKSEEDINYCKRMFEVVGETLKNEEAVTKGLEVQIKDISEFMKNSNMIYQRDFKDLYETLSSLKSQLKHSMEISSFRYDNSSTLEGPKVNTERQVLLPSTNQNLRGHKPVGVSEPSTKTTQRIKSRKKIPKSKELDISQEPYKTHRKHTNIGSNLGANQCKDTITVENSSDQKELDLKSRSSQKTLNKQIAEDVFSLSHITSSPPSKKSKKK

SEQ ID NO: 7310 - protein, 144 aa, Candida albicans
MFRTTLLKSLRASVSKPSMVKTIQSSSRSLFTITTITNNKNVTPLTSSMNFIRCYSAFPELTRDIAKERIIELLEGYDKVDQSKGEITEQNSFTSDLGLDSLDVVEVIMELEHEFNIQIPDNEADSLKTVGQTIDYILAQPDSC

SEQ ID NO: 7311-8000 - skipped (690 entries)

1. A method for constructing a strain of diploid fungal cells in which both alleles of a gene are modified, the method comprising the steps of:
(a) modifying a first allele of a gene in diploid fungal cells by recombination using a gene disruption cassette comprising a first nucleotide sequence encoding an expressible selectable marker, thereby providing heterozygous diploid fungal cells in which the first allele of the gene is inactivated; and
(b) modifying the second allele of the gene in the heterozygous diploid fungal cells by recombination using a promoter replacement fragment comprising a second nucleotide sequence encoding a heterologous promoter, such that expression of the second allele of the gene is regulated by the heterologous promoter; and
wherein the gene encodes a polypeptide consisting essentially of an amino acid sequence selected from the group consisting of SEQ ID NO: 7001 to 7310.

2. A method of assembling a collection of diploid fungal cells each of which comprises modified alleles of a different gene, the method comprising the steps of:
(a) modifying a first allele of a first gene in diploid fungal cells by recombination using a gene disruption cassette comprising a first nucleotide sequence encoding an expressible selectable marker, thereby providing heterozygous diploid fungal cells in which the first allele of the gene is inactivated;
(b) modifying a second allele of the first gene in the heterozygous diploid fungal cells by recombination using a promoter replacement fragment comprising a second nucleotide sequence encoding a heterologous promoter, such that expression of the second allele of the gene is regulated by the heterologous promoter, thereby providing a first strain of diploid fungal cells comprising a modified allelic pair of the first gene; and
(c) repeating steps (a) and (b) a plurality of times, wherein a different gene is modified with each repetition, thereby providing the collection of diploid fungal cells each comprising the modified alleles of a different gene, and
wherein each different gene encodes a different polypeptide consisting essentially of an amino acid sequence selected from the group consisting of SEQ ID NO: 7001 to 7310.

3. The method of claim 1 or 2, wherein the selectable marker in the gene disruption cassette is disposed between a first region and a second region, wherein the first region and the second region hybridize separately to non-contiguous regions of the first allele of the gene in the diploid fungal cells.

4. The method of claim 3, wherein the selectable marker is selected from the group consisting of CaSAT1, CaBSR1, CaURA3, CaHIS3, CaLEU2, CaTRP1, and combinations thereof.

5. The method of claim 1, wherein the diploid fungal cells are cells of fungal species selected from the group consisting of Aspergillus fumigatus, Aspergillus niger, Aspergillus flavis, Candida albicans, Candida tropicalis, Candida parapsilopsis, Candida krusei, Cryptococcus neoformans, Coccidioides immitis, Exophalia dermatiditis, Fusarium oxysporum, Histoplasma capsulatum, Pneumocystis carinii, Trichosporon beigelii, Rhizopus arrhizus, Mucor rouxii, Rhizomucor pusillus, Absidia corymbigera, Botrytis cinerea, Erysiphe graminis, Magnaporthe grisea, Puccinia recodita, Septoria triticii, Tilletia controversa, and Ustilago maydis.

6. The method of claim 1 or 2, wherein the gene corrresponds to an open reading frame selected from the group consisting of SEQ ID NO: 6001-6310.

7. The method of claim 1 or 2, wherein the method further comprises
(c) introducing a nucleotide sequence encoding a transactivation fusion protein that is expressible in the diploid fungal cell, said transactivation fusion protein comprising a DNA binding domain and a transcription activation domain; and wherein the heterologous promoter in the promoter replacement fragment comprises at least one copy of a nucleotide sequence which is bound by the DNA binding domain of the transactivation fusion protein, such that binding of the transactivation fusion protein increases transcription from the heterologous promoter.

8. The method of claim 7, wherein the promoter replacement fragment further comprises a selectable marker.

9. The method of claim 8, wherein the selectable marker is selected from the group consisting of CaHIS3, CaSAT1, CaBSR1, CaURA3, CaLEU2, CaTRP1, and combinations thereof.

10. A strain of diploid fungal cells comprising modified alleles of a gene, wherein the first allele of the gene is inactivated by a gene disruption cassette comprising a nucleotide sequence encoding an expressible selectable marker; and the expression of the second allele of the gene is regulated by a heterologous promoter that is operably linked to the coding region of the second allele of the gene, and wherein the gene encodes a polypeptide consisting essentially of an amino acid sequence selected from the group consisting of SEQ ID NO: 7001 to 7310.

11. The diploid fungal cells of claim 10 further comprising a nucleotide sequence encoding a transactivation fusion protein that is expressible in the diploid fungal cell, said transactivation fusion protein comprising a DNA binding domain and a transcription activation domain; and wherein the heterologous promoter in the promoter replacement fragment comprises at least one copy of a nucleotide sequence which is bound by the DNA binding domain of the transactivation fusion protein, such that binding of the transactivation fusion protein modulates transcription from the heterologous promoter.

12. The strain of diploid fungal cells of claim 10 or 11, wherein the gene is a gene essential for the growth and/or survival of the cells; or contributes to the virulence and/or pathogenicity of the fungal cells against a host organism.

13. The strain of diploid fungal cells of claim 10 or 11, wherein the gene corrresponds to an open reading frame selected from the group consisting of SEQ ID NO: 6001-6310.

14. A collection of diploid fungal strains comprising diploid strains of claim 10, wherein substantially all the different genes that encode the amino acid sequences of SEQ ID NO: 7001 to 7310 are modified and are present in different diploid strains in the collection.

15. A collection of diploid fungal strains of claim 10 each comprising the modified alleles of a different gene, wherein each gene is essential for the growth and/or survival of the cells, and wherein each gene encodes a polypeptide consisting essentially of an amino acid sequence selected from the group consisting of SEQ ID NO: 7001 to 7310.

16. The collection of diploid fungal strains of claim 15, wherein each of the genes corrresponds to an open reading frame selected from the group consisting of SEQ ID NO: 6001-6310.

17. A collection of diploid fungal strains of claim 10 each strain comprising the modified alleles of a different gene, wherein each gene contributes to the virulence and/or pathogenicity of the cells to a host organism.

18. The collection of diploid fungal strains of claim 17, wherein substantially all of the genes in the genome of the diploid fungus that contribute to the virulence and/or pathogenicity of the fungal cells against a host organism are modified and present in the collection.

19. The collection of diploid fungal strains of claim 14, wherein the essential genes present in the collection all share a characteristic selected from the group consisting of: similar biological activity, similar intracellular localization, structural homology, sequence homology, cidal terminal phenotype, static terminal phenotype, sequence homology to human genes, and exclusivity with respect to the organism.

20. The collection of diploid fungal strains of claim 14, 15, 17, or 19 wherein the cells of each strain further comprise at least one molecular tag of about 20 nucleotides, the sequence of which is unique to each strain.

21. The collection of claim 20, wherein the molecular tag is disposed within the gene disruption cassette.

22. A nucleic acid molecule microarray comprising a plurality of nucleic acid molecules, wherein each nucleic acid molecule comprises a nucleotide sequence that is hybridizable to a target nucleotide sequence selected from the group consisting of SEQ ID NO:6001 through to SEQ ID NO:6310.

23. A nucleic acid molecule microarray comprising a plurality of nucleic acid molecules, wherein each nucleic acid molecule comprises a nucleotide sequence that is hybridizable to the nucleotide sequence of a gene that is either essential to the growth of a diploid fungal cell or contributes to the virulence and/or pathogenicity of the diploid fungal cells against a host organism, and wherein each of the gene encodes a polypeptide consisting essentially of an amino acid sequence selected from the group consisting of SEQ ID NO: 7001 to 7310.

24. A method for identifying a gene that is essential to the survival of a fungus comprising the steps of:
(a) culturing the diploid fungal cells of claim 10 under conditions wherein the second allele of the gene is substantially underexpressed or not expressed; and
(b) determining viability of the cells; whereby a loss or reduction of viability as compared to a control indicates that the modified gene is essential to the survival of the fungus.

25. A method for identifying a gene that is essential to the growth of a fungus comprising the steps of:
(a) culturing the diploid fungal cells of claim 10 under conditions wherein the second allele of the gene is substantially underexpressed or not expressed; and
(b) determining growth of the cells; whereby a loss or reduction of growth of the cells as compared to a control indicates that the modified gene is essential to the growth of the fungus.

26. A method for identifying a gene that contributes to the virulence and/or pathogenicity of a fungus comprising the steps of:
(a) culturing diploid fungal cells of claim 10 or 11 under conditions wherein the second allele of the gene is substantially underexpressed or not expressed; and
(b) determining the virulence and/or pathogenicity of the cells toward a host cell or organism; whereby a reduction of virulence and/or pathogenicity as compared to a control indicates that the modified gene contributes to the virulence and/or pathogenicity of the fungus.

27. A method for identifying a gene that contributes to the resistance of a diploid fungus to an antifungal agent comprising the steps of:
(a) culturing the diploid fungal cells of claim 10 under conditions wherein the second allele is substantially overexpressed and in the presence of the antifungal agent; and
(b) determining the viability of the cells; whereby an increase in viability as compared to a control indicates that the modified gene contributes to the resistance of the diploid fungus to the antifungal agent.

28. A method for identifying an antifungal agent that inhibits the growth of a diploid fungus comprising the steps of:
(a) providing diploid fungal cells of claim 12; and
(b) culturing the diploid fungal cells under conditions wherein the second allele of the gene is underexpressed and in the presence of a test compound;
whereby a loss or reduction of growth of the diploid fungal cells as compared to a control indicates that the test compound is an antifungal agent.

29. A method for identifying a therapeutic agent for treatment of a mammalian disease, the method comprising the steps of:
(a) providing diploid cells of claim 10, wherein the modified gene in the diploid cells is an essential gene and displays sequence homology to a mammalian gene associated with the disease;
(b) culturing diploid fungal cells under conditions wherein the second allele of the gene is overexpressed or underexpressed and in the presence of a test compound;
whereby a difference in growth of the diploid fungal cells as compared to a control indicates that the test compound is a therapeutic agent.

30. A method for correlating changes in the levels of proteins with the inhibition of growth or proliferation of a diploid fungal cell, the method comprising the steps of:
(a) generating a first protein expression profile for a control diploid fungal cell which comprises two wild type alleles of the gene;
(b) culturing diploid fungal cells of claim 12 under conditions wherein the second allele of the gene is substantially underexpressed, not expressed or overexpressed, and generating a second protein expression profile for the cultured cells; and
(c) comparing the first protein expression profile with the second protein expression profile to identify changes in the levels of proteins.

31. A method for correlating changes in the levels of gene transcripts with the inhibition of growth or proliferation of a diploid fungal cell, the method comprising the steps of:
(a) generating a transcription profile for a control diploid fungal cell which comprises two wild type alleles of the gene;
(b) culturing diploid fungal cells of claim 12 under conditions wherein the second allele of the gene is substantially underexpressed, not expressed or overexpressed and generating a second transcription profile for the cultured cells; and
(c) comparing the first transcription profile with the second transcription profile to identify changes in the levels of gene transcripts.

32. A purified or isolated nucleic acid molecule comprises a nucleotide sequence encoding a gene product required for proliferation of Candida albicans, wherein said gene product consisting essentially of an amino acid sequence of one of SEQ ID NO: 7001 to 7310.

33. The nucleic acid molecule of claim 32, wherein said nucleotide sequence is one of SEQ ID NO:6001 to 6310.

34. A nucleic acid molecule comprising a fragment of one of SEQ ID NO:6001 to 6310, said fragment selected from the group consisting of fragments comprising at least 10, at least 20, at least 25, at least 30, at least 50 and at least 100 consecutive nucleotides of one of SEQ ID NO: 6001 to 6310.

35. A nucleic acid molecule comprising a nucleotide sequence that hybridizes under stringent condition to a second nucleic acid molecule consisting of (a) a nucleotide sequence selected from the group consisting of one of SEQ ID NO: 6001 to 6310, or (b) a nucleotide sequence that encodes a polypeptide consisting of an amino acid sequence selected from the group consisting of one of SEQ ID NO: 7001 to 7310; wherein said stringent condition comprises hybridization to filter-bound DNA in 6× sodium chloride/sodium citrate (SSC) at about 45° C. followed by one or more washes in 0.2×SSC/0.1% SDS at about 50-65° C.

36. The nucleic acid molecule of claim 34 or 35, which consists of the nucleotide sequence selected from the group consisting of one of SEQ ID NO: 4001 to 4310, and 5001 to 5310.

37. A purified or isolated nucleic acid molecule obtained from an organism other than Candida albicans or Saccharomyces cerevisiae comprising a nucleotide sequence having at least 30% identity to a sequence selected from the group consisting of SEQ ID NO: 6001-6310, fragments comprising at least 25 consecutive nucleotides of SEQ ID NO:6001-6310, the sequences complementary to SEQ ID NO:6001-6310 and the sequences complementary to fragments comprising at least 25 consecutive nucleotides of SEQ ID NO:6001-6310, as determined using BLASTN version 2.0 with the default parameters.

38. The purified or isolated nucleic acid molecule of claim 37, wherein said organism is selected from the group consisting of Absidia corymbigera, Aspergillus flavis, Aspergillus fumigatus, Aspergillus niger, Botrytis cinerea, Candida albicans, Candida dublinensis, Candida glabrata, Candida krusei, Candida parapsilopsis, Candida tropicalis, Coccidioides immitis, Cryptococcus neoformans, Erysiphe graminis, Exophalia dermatiditis, Fusarium oxysporum, Histoplasma capsulatum, Magnaporthe grisea, Mucor rouxii, Pneumocystis carinii, Puccinia graminis, Puccinia recodita, Puccinia striiformis, Rhizomucor pusillus, Rhizopus arrhizus, Septoria avenae, Septoria nodorum, Septoria triticii, Tilletia controversa, Tilletia tritici, Trichosporon beigelii, and Ustilago maydis.

39. A vector comprising a promoter operably linked to the nucleic acid molecule of claim 32, 33, 34, 35, or 37.

40. The vector of claim 39, wherein said promoter is regulatable.

41. The vector of claim 39, wherein said promoter is active in an organism selected from the group consisting of Absidia corymbigera, Aspergillus flavis, Aspergillus fumigatus, Aspergillus niger, Botrytis cinerea, Candida albicans, Candida dublinensis, Candida glabrata, Candida krusei, Candida parapsilopsis, Candida tropicalis, Coccidioides immitis, Cryptococcus neoformans, Erysiphe graminis, Exophalia dermatiditis, Fusarium oxysporum, Histoplasma capsulatum, Magnaporthe grisea, Mucor rouxii, Pneumocystis carinii, Puccinia graminis, Puccinia recodita, Puccinia striiformis, Rhizomucor pusillus, Rhizopus arrhizus, Septoria avenae, Septoria nodorum, Septoria triticii, Tilletia controversa, Tilletia tritici, Trichosporon beigelii, and Ustilago maydis.

42. A host cell containing the vector of claim 39.

43. A purified or isolated polypeptide comprising an amino acid sequence selected from the group consisting of one of SEQ ID NO: 63 to 123.

44. A purified or isolated polypeptide obtained from an organism other than Candida albicans or Saccharomyces cerevisiae comprising an amino acid sequence having at least 30% similarity to an amino acid sequence selected from the group consisting of one of SEQ ID NO: 7001 to 7310 as determined using FASTA version 3.0t78 with the default parameters.

45. The polypeptide of claim 44, wherein said organism is selected from the group consisting of Absidia corymbigera, Aspergillus flavis, Aspergillus fumigatus, Aspergillus niger, Botrytis cinerea, Candida albicans, Candida dublinensis, Candida glabrata, Candida krusei, Candida parapsilopsis, Candida tropicalis, Coccidioides immitis, Cryptococcus neoformans, Erysiphe graminis, Exophalia dermatiditis, Fusarium oxysporum, Histoplasma capsulatum, Magnaporthe grisea, Mucor rouxii, Pneumocystis carinii, Puccinia graminis, Puccinia recodita, Puccinia striiformis, Rhizomucor pusillus, Rhizopus arrhizus, Septoria avenae, Septoria nodorum, Septoria triticii, Tilletia controversa, Tilletia tritici, Trichosporon beigelii, and Ustilago maydis.

46. A fusion protein comprising a fragment of a first polypeptide fused to a second polypeptide, said fragment consisting of at least 6 consecutive residues of an amino acid sequence selected from one of SEQ ID NO: 7001 to 7310.

47. A method of producing a polypeptide, said method comprises introducing into a cell, a vector comprising a promoter operably linked to a nucleotide sequence encoding a polypeptide consisting of an amino acid sequence selected from the group consisting of one of SEQ ID NO: 7001 to 7310; and culturing the cell such that the nucleotide sequence is expressed.

48. A method of producing a polypeptide, said method comprising providing a cell which comprises a heterologous promoter operably linked to a nucleotide sequence encoding a polypeptide consisting of an amino acid sequence selected from the group consisting of one of SEQ ID NO: 7001 to 7310; and culturing the cell such that the nucleotide sequence is expressed.

49. A method for identifying a compound which modulates the activity of a gene product encoded by a nucleic acid comprising a nucleotide sequence selected from the group consisting of one of SEQ ID NO:6001 to 6310, said method comprising:
(a) contacting said gene product with a compound; and
(b) determining whether said compound modulates the activity of said gene product.

50. The method of claim 49, wherein the activity of the gene product is inhibited.

51. The method of claim 49, wherein said gene product is a polypeptide and said activity is selected from the group consisting of an enzymatic activity, carbon compound catabolism activity, a biosynthetic activity, a transporter activity, a transcriptional activity, a translational activity, a signal transduction activity, a DNA replication activity, and a cell division activity.

52. A method of eliciting an immune response in an animal, comprising introducing into the animal a composition comprising an isolated polypeptide, the amino acid sequence of which comprises at least 6 consecutive residues of one of SEQ ID NO: 7001 to 7310.

53. A strain of Candida albicans wherein a first allele of a gene comprising a nucleotide sequence selected from the group consisting of one of SEQ ID NO: 6001 to 6310 is inactive and a second allele of the gene is under the control of a heterologous promoter.

54. A strain of Candida albicans comprising a nucleic acid molecule comprising a nucleotide sequence selected from one of SEQ ID NO: 6001 to 6310 under the control of a heterologous promoter.

55. The strain of claim 53 or 54, wherein said heterologous promoter is regulatable.

56. A method of identifying a compound or binding partner that binds to a polypeptide comprising an amino acid sequence selected from the group consisting of one of SEQ ID NO: 7001 to 7310 or a fragment thereof said method comprising:
(a) contacting the polypeptide or fragment thereof with a plurality of compounds or a preparation comprising one or more binding partners; and
(b) identifying a compound or binding partner that binds to the polypeptide or fragment thereof.

57. A method for identifying a compound having the ability to inhibit growth or proliferation of Candida albicans, said method comprising the steps of:
(a) reducing the level or activity of a gene product encoded by a nucleic acid selected from the group consisting of SEQ ID NO:6001 to 6310 in a Candida albicans cell relative to a wild type cell, wherein said reduced level is not lethal to said cell;
(b) contacting said cell with a compound; and
(c) determining whether said compound inhibits the growth or proliferation of said cell.

58. The method of claim 57, wherein said step of reducing the level or activity of said gene product comprises transcribing a nucleotide sequence encoding said gene product from a regulatable promoter under conditions in which said gene product is expressed at said reduced level.

59. The method of claim 58, wherein said gene product is a polypeptide comprising a sequence selected from the group consisting of polypeptides encoded by SEQ ID NO: 7001 to 7310.

60. A method for inhibiting growth or proliferation of Candida albicans cells comprising contacting the cells with a compound that (i) reduce the level of or inhibit the activity of a nucleotide sequence selected from the group consisting of SEQ ID NO: 6001 to 6310, or (ii) reduce the level of or inhibit the activity of a gene product encoded by a nucleotide sequence selected from the group consisting of SEQ ID NO: 6001 to 6310.

61. The method of claim 60, wherein said gene product is a polypeptide comprising an amino acid sequence selected from the group consisting of polypeptides encoded by SEQ ID NO: 7001 to 7310.

62. The method of claim 60, wherein the compound is an antibody, a fragment of an antibody, an antisense nucleic acid molecule, or a ribozyme.

63. A method for manufacturing an antimycotic compound comprising the steps of:
(a) screening a pluralities of candidate compounds to identify a compound that reduces the activity or level of a gene product encoded by a nucleotide sequence selected from the group consisting of SEQ ID NO: 6001 to 6310; and
(b) manufacturing the compound so identified.

64. The method of claim 63, wherein said gene product is a polypeptide comprising an amino acid sequence selected from the group consisting of polypeptides encoded by SEQ ID NO: 6001 to 6310.

65. A method for treating an infection of a subject by Candida albicans comprising administering a pharmaceutical composition comprising a therapeutically effective amount of a compound that reduces the activity or level of a gene product encoded by a nucleic acid comprising a sequence selected from the group consisting of SEQ ID NO: 6001 to 6310 and a pharmaceutically acceptable carrier, to said subject.

66. The method of claim 65, wherein the compound is an antibody, a fragment of an antibody, an antisense nucleic acid molecule, or a ribozyme.

67. A method for preventing or containing contamination of an object by Candida albicans comprising contacting the object with a composition comprising an effective amount of a compound that reduces the activity or level of a gene product encoded by a nucleic acid comprising a sequence selected from the group consisting of SEQ ID NO: 6001 to 6310.

68. A method for preventing or inhibiting formation on a surface of a biofilm comprising Candida albicans, said method comprising contacting the surface with a composition comprising an effective amount of a compound that reduces the activity or level of a gene product encoded by a nucleic acid comprising a sequence selected from the group consisting of SEQ ID NO: 6001 to 6310.

69. A pharmaceutical composition comprising a therapeutically effective amount of an agent which reduces the activity or level of a gene product encoded by a nucleic acid selected from the group consisting of SEQ ID NO: 6001 to 6310 in a pharmaceutically acceptable carrier.

70. The method of claim 65, wherein said subject is selected from the group consisting of a plant, a vertebrate, a mammal, an avian, and a human.

71. An antibody preparation which binds the polypeptide of claim 43 or 44.

72. The antibody preparation of claim 71 which comprises a monoclonal antibody.

73. A method for evaluating a compound against a target gene product encoded by a nucleotide sequence comprising one of SEQ ID NO: 6001 to 6310, said method comprising the steps of:
(a) contacting wild type diploid fungal cells with the compound and generating a first protein expression profile;
(b) determining the protein expression profile of diploid fungal cells of claim 12 which have been cultured under conditions wherein the second allele of the target gene is substantially underexpressed, not expressed or overexpressed and generating a second protein expression profile for the cultured cells; and
(c) comparing the first protein expression profile with the second protein expression profile to identify similarities in the profiles.

74. A method for evaluating a compound against a target gene product encoded by a nucleotide sequence comprising one of SEQ ID NO: 6001 to 6310, said method comprising the steps of:
(a) contacting wild type diploid fungal cells with the compound and generating a first transcription profile;
(b) determining the transcription profile of diploid fungal cells of claim 12 which have been cultured under conditions wherein the second allele of the target gene is substantially underexpressed, not expressed or overexpressed and generating a second transcription profile for the cultured cells; and
(c) comparing the first transcription profile with the second transcription profile to identify similarities in the profiles.

75. A method for identifying an antimycotic compound comprising screening a plurality of compounds to identify a compound that reduces the activity or level of a gene product, said gene product being encoded by a nucleotide sequence that is naturally occurring in Saccharomyces cerevisiae and that is the ortholog of a gene having a nucleotide sequence selected from the group consisting of SEQ ID NO: 6001 to 6310.

76. A computer or a computer readable medium that comprises at least one nucleotide sequence selected from the group consisting of SEQ ID NO: 1-310, 1001-1310, 2001-2310, 3001-3310, 4001-4310, 5001-5310, and 6001-6310, or at least one amino acid sequence selected from the group consisting of SEQ ID NO: 7001-7310.

77. A method assisted by a computer for identifying a putatively essential gene of a fungus, comprising detecting sequence homology between a fungal nucleotide sequence or fungal amino acid sequence with at least one nucleotide sequence selected from the group consisting of SEQ ID NO: 6001-6310, or at least one amino acid sequence selected from the group consisting of SEQ ID NO: 7001-7310.

78. A protein array comprising a plurality of proteins, wherein at least one protein comprises an amino acid sequence or a portion of an amino acid sequence selected from the group consisting of SEQ ID NO:6001 through to SEQ ID NO:6310.
